United States Patent Application Publication US 2023/0172999 A1 - sequence listing, part 6

SEQ ID NO: 8 - DNA, 3559485 bp, Coprococcus catus (residues 1,779,744-3,559,485 of 3,559,485)
  misc_feature (368422)..(368431): n is a, c, g, or t
  misc_feature (374179)..(374188): n is a, c, g, or t
  misc_feature (396178)..(396187): n is a, c, g, or t
  misc_feature (853083)..(853092): n is a, c, g, or t
  misc_feature (1725383)..(1725494): n is a, c, g, or t
  misc_feature (2422876)..(2422885): n is a, c, g, or t
  misc_feature (2538270)..(2538279): n is a, c, g, or t
  misc_feature (2987512)..(2987521): n is a, c, g, or t
  misc_feature (3011881)..(3012031): n is a, c, g, or t
  misc_feature (3213927)..(3213936): n is a, c, g, or t
  misc_feature (3242409)..(3242530): n is a, c, g, or t
  misc_feature (3421351)..(3421360): n is a, c, g, or t
  misc_feature (3447161)..(3447170): n is a, c, g, or t
  misc_feature (3506976)..(3506985): n is a, c, g, or t
  misc_feature (3510704)..(3510812): n is a, c, g, or t
  misc_feature (3526805)..(3526814): n is a, c, g, or t
aacagaaaaagcactccactttccattttcatataagaacatatcttttgtgtggttattaaatatatcccaagggaaaatatcccctttaatatagatatttcctcttacttctccatacacatggctttctccaccgatgacaggtgcatttactcctaccgtatcaataaatgcttttccactgattatcgcattttcctttatctcaccgccacagatataacagtctctctttgcaactgctctgtcataaaaagtagtatctccggtaacaacagcataacctctgaccagactgccatcataaagtgcagcttcttcctttacctcaccgttttcgcaacagattgcatcatcataaatccagcaagttccttcctgtgacagattgttttcattctctacaaaaccacctattgttccttttggtactttctcattcacatctgacaccgcctgtattcgatggagccatggatatttcggatgttcaatttccgtaatcttatacttactcacgttctctcctttcatcgttccggctgatgtttcttctttgccttcttattttcttttggcggcgaactcaactcagtttctacatattcgctgataatcaaaagtgctttgtaatagtccccactttccaatacccttttacgcatttcttttgcttctgctgtctgtttattcttttccaaaagagttgaggcatcgcccataatggaaaaaatattcccattatgtccaaggagctgtaacttgggacgttgtttctcaggctttgtcggaatctgctctgttttcttttcatacattttcggctgttccatatcaggatgccaaaaatgcacattcagcgttccgccatctacctttatatccctctgctcaaatccttcaccccaaccgtcactgtactgtcctgtaatgtattcggtgaattcctgtagttcttcctgacttaaaaattcatttaattccagtttggtacatccgtacaggattccgtctttgttttctatcgtaacaactgcactttgtatctttccctgaatggactcacttccgtcaaaatactgcatgagatcatcttccccatagcgttccagttcttctcggatgacttcttcataatcggcaagttctgttccatctaatggcattccatattcatcactctccgaccactcttcttcccattcggattcttctgaataaagatttccagtcagctccgtcaacagatgtacgtgcatcgttcctttttcttccattctctatcaccttctttctaatggtctgtccctgaatttatttgtctgctttttttctttcgcaaggtctgcatgatctgccccttctttttccggcagattgcagataatctgatacgttccctcataatgttttttcatctgttctttcgcccatctccctgcaaagtcattatcggtacagatttcaatttctttgatttccggatggttcttcagaaactcttccagtgcgtccggcggctttttaaaacgttcactttgtatctgtgcgttatctttcggagcagcgattcctccaagggaaagacgatatttatccctctttccctcttccagtgtcatgtgtgccagtgcatctatacacgcttcatatacggcaactcgctttgtttctctttccggtggaatgcaaaagctgtactttttttcactcccggtctgctccatcttgaatcccttcccgtttttttcatagattcctcgcaggaatgcatatcttgcttttccagattcatctttcccaacaaaaacagcgttatggtacgggacactttcataaaggatttcatgcgaaatgcaatacgtgatcacttcatcgctgattcctctgtggtttaaataagccctgattcgtctgcaattacaatatctctccggcagtttaaatggcggtttttgcctttctgcagactgtgtcggaataaaagacggactctcttcgcacagcagttttacggcatctgtaaatttcatcccatctacttcaatcaggaatcgcagtgcagacacgccaccgatatctctggatttccaatgccatttgctggacagttcattgattttaaaactgtcatgatccgtcaactgccattcatttctggttcttgtcttttgcagtcgctgtgcctgatgcgtccgcaaatactcatacgcagtcatattttttgctgcctgaatctcttcttccgttacccagggcattacagaattgcgtcctgaagagccagtaccttatccgtccgctcccaaggaaactcctttcttccaaaatgaccaaaaactgccgtctgacggaaaatcggacgattcagtcgaagggattccatgatctgaacgggtgtcactccaaacaccagtgggattgctgccgccagacaatcatccgcacacacttttcctgtaccaaaggtgtctacctcaatcataaccggctctgctactccgattgcataagccaaagacacctgacacttgcttgcaaactcagcagctactatatttttggcgatataccttgccatataagctgccgaacggtctactttcgaacagtcttttcccgaaaatgcaccgccgccatgcggaaccatactgccataagtatccaccatcagctttcttccggtcagtccggtatctgcatcaaatcctccgcacacaaattttcctgacggattgatcagaatcttcgtatcctcatccggcggcagtaatctgagtgctgagcgaagcactttctctctgatctcggcatctaacttcttcaggttcttttctgcaccatgctggcaggaaacaacaacactttccagtctcactggttttccatcttcatattctacggttacctgtgcttttccatccgaaaagatatctttgatatatccgcttcttctgcaagccgaaagttcacgtgtgatccggtgtgccagaacagtcggcattggcataagctgcggagtatcatcacacgcatatccgaccataacaccctgatctccagctcccctgcttctatctcttaattttgcgccgatattatcccgaaattctttcgacacactcactgctttcgcaatatctggactctgctggtgtacaaacgtatccatttctatcccatctgtacaatatccacactcttctaaaacttttcggatcacatcaaacactggtggttcatatccgctggtgatttctcctgctacaaacacatttcctcttgtagcaaggacttcacacgccactctcgaagatggatcgtaacgcagacattcatctaagattgcatctgctatctgatcgcatcctttatccgggtgtccttctgttactgattctgctgtataaaaacgtctcatctttcttctccttatctacagacagggcaggcgctgccttatgaacatctcctgccctgtcagattggtttatcctgtaatttttattttattttacttctgtttcttctttgttgtctgtcatttttgacttctttctgcagtatacagtcactcctgtagctgttccggcagatgccagtgcaagcagaacaaacggccatactttctggttatcacctgtttttggtgcatttgttttttctgttgttttctccggtgttctggcatctttcatttctactttctggacttccattgtatctttcaatgtgaatgtaacatcttccgcaatctcgtaaccatccggcgctgtgatctcacgcagagtaagttcttcattgaccgggagctttgcaacggaatgtggctttccatccgtaatccactcttccaaaacagttccatctttgcggatgatctgaagctttgccccttccagttcttttccggttgttaggtctgtttttgaaatttccactttggaatattcgtctttcatctcaacctttgtcacacttccatcttctttgacttcaaacgtcacatcgctggcagacacatagccatcttcataaggagccagttcctcatgtaaggtataacttccttccggcagtccgtaaatgacatgttcttccttcgtactgatccactcttccacaacagttccgtctttatcaatgacctgcagttttgctccttccagctcatttccggttgttgcatctgttttggtaatatgtgtttctgtcggctgattctcaacttctttgttcagttcaatctttgcaagattctgattttcgtaagttgcatctacattccatacttcctcatttggaagatatccagcttttctgacttcctctttgacatagtattttccatgtggaagatcactgtcgaaagtaagtgttccctttgcatccgttgctttcttttccagcaaggtatctttctctacgagaacctctccctgattagaaagaatatcttctgcagcatacagtccaaaaataacaccttccagcttttcgcctgtgacagaatctttcttttctactgatacgaaaactttctgtctttcatttttataggtaacgccttcataaacaactgcctgtgtatcatcctctgctgtcagggtaaattctttctgttctgtatttaggacaaaattctctcctgctacaacttctttcagataatacgttcccagtggcagattgttgataactgctgttccattttcatctgtagtcagtttggctaccaggtcatctttctcatatcggacaactggatttcctgcttcgtcctttgctccgtccggtgaatagatggtatctttggcatatatttcgaattcagcgccttctactccggtttcttcatatttaaagcctttataaatacctgtttcttcttttccagatacggcatttcttacttttgaaaccagtgcttttacttttgccagaacagaatctccggttacttcggtaagctgttctccctttttcgtcaggagcaggcttcctacctgttcatcgtttttctgttctacctctacaatcgcagctcctgtatctggatcaatctgatgtgcagtgtttgaggatactgtaattacaataccactctgtggattttctttatatgttccttttgtagtctgttctaatggtgaaataatcgttgttccatcatacagggactcctcgcttccctgtcttacaaatccttccggtgctttcacttcttcgattcggtaggtagagcacttcagttcctgcggtgtgatcagatatccttcctcgtttgtttcgaatacactgatcttttctttcttcggatactgaacaacctgttccacatatttcttatttgtcacatcgtaaatcttataagaagcaccagcctttaaaacagtatttccagtctgtgcatccttctttacaattttcagcaaaaattcaaacgggcggtcatcaaatactctccactgcattggctctctgctgtcattttccacatttacaacaaatggatcaatggttttcaaattctcaggggtagtactttccactacaacataacttccatacggcagttccgggctgactgcatatccttttgtatcagtgatcagttctggtactggtacggctgttccattctcgtaagtaactgcaacctgctctttgctgaagtcataatttttgaaatcgcttgctgtatagctttctccattggctggcttcagttttccattttttacctgtgtcaggtcgctgatcagatataccttaaatcctgctcctgcaaccaggtctgtttctgtctgctctccatcttcactgattttgattaactggaatgcctgtttctttacctgctcttttaccgtaaggtctcttgtcacttcggcaacatcctgaccttcataagttactgatacctcgtatttggtagtatccagtgtatatccttccggtggagtgatttcttttacatacatttctccaaggtataattctgaaaattccagtgttccgtcatctccgatgactccctgtgcaatcaggctgtcctgtttatacagaacccctgttgtgccatccggatgcacgatgtcctcttttgcatacagaccatacacagcaccacgaagaacactgtccccctgcgctttaaatgcaagtgtttctttatcgatctttgcgattttcacctttccggtgactctctcatctgttgctgttacagtcattgtctttccggcagtaacagccactttatatacttctgtattcagtttgtatcctgtcggagcagtgatctctttcacgtacactgttttcagtgcagaatcaaaataatcgctgactgcttttccgtctgttccggttgctgacattgtcatcagcagattttcacacttcttatcagtataaataccataaactgctcctgacagtggattctgtgtattgacatctttcttcataagttcaatgcgtgtcatattcagccactgtacactgaagcttaccggcgctgctgtttcgctttcaaatacaccgatatcctgcttggaatctccggttgtcagcaccagtgttctccatgtctttccgacagaaccatataagctgccggaagcataactgcccgtcagtaataaatccgcagacagatagaatgtatctccaccataaatctggatttttccatttgtaacacttgttcctttagaaagattatgtgcagtcacattttccggcacactcaatgtcacatagtttctgtgatctccagacagtgtgatgtttggtgttttctggatgtttccatcccgtactgcattcagctttgtgcttgaaaagctcagttcaccttttggcggttcttcctgtccgaacagataattgatatatgcgataacccctgcatttacaaggtcattataattacatccggtaaatccggcttctcctgcgtaagcgtagctggctgcaatatgcgtatacacatacttttcatcctctgatttcccggacagataacttcctgtcagatctcctgccccgccatagccatagtaaaggactttctgcagattcttgttactgtccaatacctgtgccacataacttccactcggtggggatgctttctgggactggagacagtatgcgatctttccattgactgtaaacagacaagtaagataatttccaagataacttggataatagatcgttcttccttttgtcagtgtgactgttgaaccgctgcttgtggctctttcagccgcagacagtaccatgacatttccttcttcaatatcctctttgaattcttcgattgcctgtgcagatgcatcttccccggatgcctcgatttctacatcggtatagttctgcacaggcgagtccgaatcatcttcagattttgtatctgatttttgcttttccccaccattgtcctgtgcatgtgcctgaccttccgtatccgtcaggatcacctttcggttgatggtatagctgtcactctgatcctttggtacaaccatgtaagaggcaatgtaagttccggctttgtccggatggtattccccaccattttcatcttggatgctgataagtgtaacatcctctttttctgcatcataatggattccttccatactggtttccgctgcaaatgtttcatccgaaatctctttcgtgatatcgtctgccgtaaccgccttttctttctgactcgtaaccgcctgttcggatgcctgtacctcctgccctacatccgtctgttcggcagcaaacgcattggcactacttaaggtactaacgcccatcaggacagccagtccaaaggctgcgattctgctttttaaattcttcaccttcatgtgtgttcccttcctataataaatatattgttcagtaaaataccgcagaaggctctccctctgcggtaacatttatcttgtatattgcttttctgcttttttcatttcctgtctggtgcgttttactgcatccatcaccgactttgtcggtaaaccgttttccagacatccttccagaattccatccagataaaattttgatggtcttgccggaacatccttatgaggggagttcatcgtgtatacgaatacttcccttgcagttccagcctgatcctttacctgaatggtttctttcccataaaaattcggaaatccttcataaaaatccagattcttttcacaagcttctgtgattttccataagactccatccacacagcttcctttttccggaagcacagttgcaacgccatttcccggagctctgccacggaatgccagccggtaatcttccagccggacatttccaaccacttctgcatctggacagcggaatctcatctgccccaggttcatgttactgccatatgcaaaataatatctctcttccatttttctcacctcgatctgacgtcttccgtcctttgctttttcttcagacactcatacgtgcttttgtcgtatctccatgccagatcaccttccagatttaccagcaggtgtttccgtacattcttatattcttctccgattaatccgagccgcaacaaaaacgttcggaatgtaaacgccgggttttctgagatcggtgtctttttcatctgggtggatctctgattgatcgcctgtgcggaaatcgcaagtgccagtgtaatgttcgccctcacttttcctgcatgaagggtactttcaaaacagcgccactccaatgttcctttggaaaatacagcatggaggtttaacgcataataacgggtatgatcataatgggtatgacttccatccctacctccataccagacatttcttactcggtccatagtgattgatctatttggtatttttcggattttctctaatacatccggtcgcaccctctggcaataactatttgctcttctttcctgcacttttaatgctttgaacaggatatcttcctttgcgtacataatggtcagcgcatttttcagactctgcggtgtatggttcgccgcatctacatgaacatgctgaccacaggactcattgacaaaacctccatgtctccgcagacagcgtacaacttcctgtaattttcccatttcatcataggataatttcggtgataccatctctgttgaatattctccatctgctgatacgattcgaccacctgattttctttgtgtatcaatacttccgtcagacatgaacttccacttttttccttcccgatctctcgctgaccatattccgtaatacgcaccttcataaacggcttctgtcccgaacagttctgctacaacttcggcagcccgttgtctggtgatccctgtcatctcgatttccgtaccaaagtactgatcctgaattccaatcatcaccgacactatcctttctcagacagttccagttcttttcgctccgcatctgcctttcgcagtagtgctccgattgcttcgatcaccgtaacagttactccgttcccagcctgtttatatagctgtgcatccgatgtgcagtctatgatcttatcgatctgccagtcataatatccctgcagacgcagacactctcttggaaccagcctgcgtattcttccgtgatacaagatgccatgacgatctgttgcagtaatcgtgaacattggttcttccggtttcttcatgcgtctgccgttctgccggacattctcttttgctggtgttaatactgctcttgctccatcctctgctaatacaccggaacattctcctttatatttgtggacaccgcattgtctggtgttcaggcttctgcattcttccgttaccaccggcggcggtgaaagatcgacaaagtgcagcgttccctgttgaacacctgttgtcagggtatgtgcgatctgatgtccgactcttcctctcctgctgttgagattcgcatagcccagatcgatgctgtccccttctcttgcaagtttgtagccgagctttgtattctctttgattggaacacctacatcatataatcctgtcttgccgcccattccacctgcctgtgatgtcagggtacagcttagtcctttgggactgtagactcttttcccctgacttcctgcccggatttgaataagagctgctccatttgtttctggttcaggtaatatttttccggcacatctgaaatcaagatatccgacaatatacacccgtttccttgcttgggggactccgaaatccttgctgttaagcactttccattcgacatggtaccccagttgcgaaagcgtactgaggatggtgcaaaatgtccgccccttgtcatgcgaaagcagaccgggaacattttcaaggataaaatactggggtcttttagctttgagaagccgggcaatctcgaaaaagagggttcctcttgcatctgcaaatccttcccgctttccggcgatagagaatgcctggcaaggaaatcctgcacagagcagatcaaaatccggcattcgttctggttcaattgttcgtgcatcactacaataccactccccttctgtgtcaaacagcaatcggtagttcttatccgcataagtatccacctcacagtgtccgacacaggtaaatccccctgcacgtcttaagccttctcggaatccgccgattccgctaaagagatcaaaaaattgaatggttgcggttatcaacctcctttgctgataaaaaaaggcggcatgatttttctcataccgcctgttggtttctctgtatctgtttgttaccattctgttggttcttctgctttggtttcttcttccggttgagtctcctcgtccggttcgctttcttctttcagttcggcttcctcgtccggttcattttctccttccggttcggtttcctcgtccggttcggtttcctcgtccggttgagtctcttctttttcagattctccggttgcaggttcagcttcttccatgctgtctttgttctgccattcggcctctgccttttccagtgcctcttcgatgatctgaattaagaagtctttctgtttcatgcctttttttgcgatgactgtttttaatctctgaaataattcctctgatacctgtactgcgattgttcttgctgttcccatgctcatttctccttttcctgcaagtctttcaaaatgttcttcgatgacctgctgtataaatttctgtgtgctgctttctgtcagttcaatctcttctcttactttttcgtgtaagtccttcgggatctttccgcatatgttcttcatctctgtcatagcgtttctcctttccgtttcgctacacacaacatactccaaagatgcatggaaagctattcacaatacctaccaaagatatcgatgctgttttgctcctgcccctagcagatccaacaatgtatgtatcgcacaatcataggcctcaccccctttacatgttttccatctgagataagaaattcatcatctgattcgggatatcctcagccggtggatttgttccactttgttccgcactgccacaaatgtttaattcccgaacactttctttgatcgtcttttggatgatctcttccatccactttcgatcctctttttccagaatcgcctgaacaaggtattggtttttctgtccttccggaacgctctggaatttctcccatgctttcttatgttctggatttttcaggtttggacggaacgaatataccggacgtgtcatttcgcccacatctgctctacaatccgttcatatccggcagcgttcgcatggacgtcctcgataaaaacagggcggcaaatcgcgtcctgtgcggtcacgtggcgttttaaaatcgcagaacctccacccataaatacggttggtactgcccggagatcaaacccggattctgtcaccgcagacagtattctttctatatatttccgtccgttttcctgtatgatccgtctggcctcttctaccatactgcaagattctccccgaagcacacgctcaatttgagtttctgttacagacagtccggtatttctacgcacttgctctgctgtttcatcaatgcatcggatcactccaagctccagactcctgcacgttgctgcattcggaacagcattgtccaacctcataaggtcaacggtccagccgccaatatcaacaagcagaacagacggttcattcttcagatactctggatgcaaagcaagcgcagagtatccctgtgggaacagtttcacatcttttattgttatctcatataattcactttcatataaaaatcgcactggctgctctttccgcaacagatactccctgaatccctgtttctctcttccaaaacttgaaagcggaagtccgacagccagaattacctctgtctttcgttccgctttccggtgcttgatttcttctgcaatggctgccaacgtcagcagataataattatcattggacgttttattttttaccagcgtctgtcttcccgtaccgcagacataatactttccctgatactgcagaacattctgcatggtatacggctcgtaatcatacccaataattccacttgggaaagacacttgtcttgttttaatggcataatagccatgatcaattcctatgattatcgcaatcacatcctttcatttttctgtttaacgtaagtccaaaaatgttttcactgctgcaacggattgttgcaaaagtgtcattcgtgaacacttttctatgttccagcgtcccaaaacctgcggaaaatctggcttttttataccactatcgccagaggaacactactatttcttcccagccggttataaaatatccctctcccggcggctgtccagcctgtccgggagagggatatatcgcaatgttcctttttgaacaatggcctgtctttttatttttatgagatgttcttcctgcttttgtagcatggaggaatactcaacttccgtcaaaaatttccgaatatatgctccttttttccccagcgtgttatctgtttttaacatctctatttctaccatgtaatgggtatccggatgatatctggtttcacataaaatgctttcgcctttgatataatctgatttcaccgcctcccttgctgccgctaaaagttcatggatacttacctccacctgcatcacctccttcaaaaatagcgaaagaaaagcagaccccttaatcgaagtctgcctctgttggatatggtaatcctctcttcttatattttaaatcaatcatttttcggagcttctctcttttctctttcgttggcgcatgcttttgaaattcaaccagccatctttctaatcttccatcatcatcgatccacgtatcgttttcgtattcccattcatctaataacttgatcaatgcatccaatggttcttccacatcatcgccaaactctttccataaatttaatccataactttccaagccaaagaattctgttagaaatgaaaacctctccatatcccccaatgtcatcttttttctgcccgtcaataattcctgatccctgctgccacagtaactcaagaaaatctttttttctttctcactttcgctcatagattgtcccctttcagaaataattctttattacgaaacattataaaattttaactcattagaatcaatatatatgtttccaaataacgaaactttcattttttaaggagaacgtattatgcagaaaatcagaccagatatggatatcggtaaaaatattcaatctctcagatacaaaaataatctaacgcaagaccaggtcattgcaaaattgaatctcatgggtattgtcatatctaaaagcacttatgccaaactggaaacaaaccgcatgaacatcaaagtgtctgagttagtcgctctggcaaagatctttcatacagatatcaatgcattctttgacgggctgctgtaattcgacattcacctactccctgtgtgtatataataatctctaaaaaaagaactagtctatattcttatcggatataaaccagttctttttctttccatctatattatttttactatctatattaaccattcaatattcccctactacatatacatattttttcattatctgtgcatacagtacctatattctcttccacatcaactgtatacactctatatacaggctatcttgttacaccagtttacatcaagaatcaaaatttccggtctgtgcaataatgcacgggcaatatcaattcttcttctctgacctcccgacagcttacctacaggtctgtttaaaaactcgtcaaaatccaaaatctcgaccagctcctgtaatctcttatcaaaagcatttcctgtaatgccgtacaaagcagctctgctcattaggttctcttccaccgtaagtggtttatcaagtacgctatcctgaaatacaacaccaagcatcctttttgtctgtgcgccggctttgtcagtttctattccgtttacctgaaccgttccactgtcttttttcagcagtccacaaagaatagaaatggttgtacttttccctgcaccgtttactcctagaaatgcaaacaattctccttttttcacacgaaagctcaaatcatttaccgcttttacttcgccaaagcttttattcaagtggctgattttaattatatctgattccatattttctccttttgtttcatctttccttaacggattactatattatttttcatgatctgattttccttcacttcaactcttgtaccaaactttttatagctgatacaaattcatcttttacattttgcttatcttctgctccatcatacatgctgtaataaaaatacataactgcataaaatccggcagctttgtccttagcatttgcaattccaatactttcaaataaatctttcacataagaagcaggtccagccacgagatattgctgatataaattctgcatttcttcactgcgaaactgctctatggtcagcatttttcgaaacgatgatgcaaaatcatcctctgtccagtattcaaacatagacttgctgtattccaccaaatcatccagagatacattctcatactgttcaggcattttttctttttcctcttccggcatatcatattctactgcctgttcaccatcctgctgctccatacgctgtacaatacagtcaaaaatatctcttttacttttgtaatgacggtacaatgcaccttttgtcatatcaagctctcctgctatctggctgacggagacagcctcataaccatctctggcgaacagatgcaaggctacaattaatatctcttctttcctattacccacgctggtaaacctccaatccaaaaaataaacggccgtttacaccttcataatagtaaacggtcgtttatttgtcaagacttttcttttgcttatattatctctttttataagtcaacagctctggattttcactttttgttcattaggcagagtatattccacatcaatatactttattttgtataaactgtattcccttttgcaattacttcaacaagctgaagttcctggtcaagaatacaaagatcagcatcataaccttcttcaatcttaccctttcctttaagacgaagaatatctgctggattagatgtgattgtagaaatagctatttctaaaggaatttctgttttaaatacacattcctttacttccttcagaaggcagctggactgtccaacgcccattccaaggaattcaccatcactactgtatattggaagacttccctggccatcagaagaaattgtcatgcgatcaggatttactcctgcatctaacattcgtttaataccattacacacacgtacctcatcacggatagtttcccaataatcaatattttcatttccggtaaagtctactgctccgcctttcagcgcatactcaatcgacttgccaaaaagcatctcatttcgattgatatgtgttggcaatatttgagaagccggtatctctgtctcatctactactcgttcaataagatctaagcatctcgggctgtcgccaagatgaacatttacaataccggctttcccggaaagaacaccaccaagtcttgtatccgcaacgacacgtgtaaattcctcaaaagtcggctgtgaagaacgatgatcagagatcgcgatttctccagttccaatgatttcctgaatcatcataatatctttcgcaatactgtcagtcaacgtgcgcaccggaatctgataattgcctgtataacagtatgcagacattccctgctcattcaatccttttgtctttgcaaccagtgcacacatatcacgaccgattccatctgttccaaggcagccaacaactgttgttactccaaacttcgtaattccttccatagttgcttccggagtacgattggcgaatccaccttcgccaccgcctccgagtacatgaacgtggctatcaatgaatcccggagttaaaagtaacccctctccattgatcatttctgcctcagaaagaaatccgtctgcggatatagaacctgcatctttaatcttaacaatcttatcattgattgtaagtacatcttttttccccagatgctgtggggcataaacatcaatattctgaattaatttcatcataaatcactcccaattatcaagtgcaataaaatattctatgtttcgtaaaatccctttggtaaaagaaatgtcagaagtgctgcgataacgactaatgccaacactcaacagctacttttataacaccatctctcttattctcgaagagatcataagcctcttcaatcttacttagaggataggtatgcgtaataagtggttctgtattaatctttccgtcagcaatcagtttcaatgtctcatcgcagtcgcatccatctactccgccgattttgaaaataagatttttgccatacatatccggaagcggtaaactctgtgctttatcataaagtgcaacgattgttacaattgcatttggtcttgcgcactcccatgcaagacgaaacgttgattctgctccggcaacttcgagaacaacatctgctccaccatgatcacttgttttcttaacaaatttctcgcattcttccggggaaacagtaagtacatctggataatgcttattaataaattgaatacgttcttcgtctttctcacacatgataatgtgctttggattcttcagcataacgcaaagcaatgtacagattcctgtaggacctgcaccaatgatcagtactgtgtcatcttctgtaatttcagaaatacgagttgcccagtaaccggtagccagaacatctccaacgaataatgcctgtctctctgtaacttcatctggaatcttgtttaaaccttgatctgcgaacggcacacgcacatactcagcctgaccgccatcgatgcgacagccaagagcccaaccgccattttggtcagtacagttattgacgtaaccttttttacagaaataacattcaccacaaaatgtctccacatttactgttactctgtctcccggtttaacatgagtaacagcacctccaacttcttcaacaattccaaccatctcgtgaccaacagtaattcccaaaactgcacgtggaacacttccatgcttgatatgcaaatcactggaacagatactcgcaagcgttacctttacgatagcatccctttcatgcatgattaccggtttcgatttttctcttaattcaaatttcccttttgatacatatgtataagtctgcattgttttctccccaccattttcgaataatataaagcggtttgctctttcggattatctccatcccgataaggcactgtggccgccataacacactatttcagcccgcttccttcttaaagctcattatatttctttgcgctgcctttggctttctccactggatattttgcctcattcattgtcatcttcatattgataatttcatccgcgtccaatccaagagcatccaacagattctgggaatacaccatcacatctgccaattcctcttttacatgctgcaaatcatactccttatcattccactgaaaacactctaataattctgccgcttcaatgactatggattttgccaaattgcccggagaatggaactgctcccactccctgtcttctgtaaactttctaattctgtctattgtttcctgtttcataataattcctcacttttcaccagataggttcatttctcttattgataaatcttttatctctgtattttggtatccgcaaaccgaacatagctggctgctggcataatttccatgttcccatgccataagtatacaatactatctaacttttggctaccgcaatcccaccttcgtctcctcggtccatattttcgaataaatcgcattccgacattccatttcaacatcgtaatctgtcggataatcctgaatggagacattacttttccattctttacggcgacgtttatgtacaaaacggacaatagtaaccaaataatcgctgtgcttttgcaatgatgaaaaaccggtcaactgattttcctaaaccagccaaccggcatattctcctttttcttctctgtctatcttatttcatacaattcattacaaccgtaatcatcatttccatctcatccggtctggactcagcaatcataatcgtcagcgctaccagtgtatgatcatcaattgtcttctgaccattggcaaacagtgcaccattcttatcaagaaaatacaagaacatcgccgctgcaattctcttgttgccatcgaaaaagctatgattcttcgtcacaaaatacagcaaatgcgccgctttctcttccaatgtcggataaacttccatgcccgcaaaagactgataaatgtttccaatactgcctttaaaagagtcgtctttttcctttccgaaaagatccgattctttgccaaaccgcatacaggcgatcacatgcatacattcctcataagttaatacatatgcggcttcatttccttttggtctttccatcgcctgatggtcatacgcatccaacaaatccagtgccgtactgtactgctcaatgactgaaagtacctgctggctgtcaaatgaattattctgtgtctgtttcatcgtatacctcccatgtatgtcattctatcatcagctgaattcagtataacatatcagctgagattttatcatttttgcaatataaattatcatctataatatcatttttgcaacattcaattctttctccagccaatcttccaaagaaaatatttatttctacaaagaaaaatgcagcgtccaaaatacgctgcaccttcattgcactactagttcactcacttatattatacgctgcattttatttctcaattcaaggcatcatcgtctttttcgaatttcactgtcagataataaacctcatcattgcaactgtccatatttccattttcaatatctgagaatggcgtcacactcaacgcgttttttgcataatacaaagccaatatgccgatttcttttccgggctgaatcgttattttcccttcatcaatgctttttgctgaccgtccgtaataatttctaccctgtacatcctccaaaatattaaattccgtagaaaattttgttccttcaccggcaacaatcagtttaactttaaaattctgaaaatccggtataaccgcaatcattccgtttcttaacgaaatctgctcaagctcggaccagcttattgttcccagcgagctttcggattccaacacaccttttttgtaaacagccaattcaaatgatatacctttaattttcttatccacagcataatcatataaaaaagcgccatccgcatctgaaagcataccggcaatattcatctctgtactatcctgtgccagcggttctatgtaattcactctcggctgatttttaaacgtcaacaaataaatcagaatccccgccatcacgcttccgaaaactgccagcaacacaatgatttttttcaatttgcgcttgcggtgttctccatcctccgtcacctggatcagattttcctcggatttctgaagcacctcagcaggttcaatatcttccccggcaataaattcattgagagatattccgaggatttcacacaacgccatataaacagaaacatccggcagacagatgccccgctcccacttggaaacggacttgtcactcattcccagtttctctgccacctgtgcctgcgtcattccaagggcttttctctttccagcaatatattttccaatcttaactgtatccatggcaatcctcctttttaccttttcagcataacatgaccagctaaaaatcaacacctctccgtggtagaattgccatggatgccccatagttacaataaatttgccaattcaaaataaatatctctgtcacaaacgtgattgtcagatcagcacaaacttatctgctttcctcttcggtgcctttggcgcctcctcctctgcattgtatcccaaagctataattcccaccagttcaccatgtcccggtgcaaattcatctctgagatcctttgtcatatgagcctggtttgctgctgtcatccaacagctggacacaccatggtcataggcactgagaaccagattctccatggaagctgcaacactctgaacaacaccttcatccagaagggcccatgtataatccggcttgtccctgaaggccagtactaccgcaggcgccccgccaagtgtactgatgaacgaaagtgtcgtctttacaacttccgggtgagcagaaaaacgttcttccagatgcggtctatccctgtcagaaacaacgctcatcatttctttcaatcttgtcatcttctcaggtgtacggataaccacataataccatggttggagattcactcccgatggtgcccacagggccgcatctacaatttcttccaaaattttgtcatccaccggtgtatccttgaatcttctcaccgacctgcgtccgtacacaacatctttaaactccataaacattatctcctgtaatctctattctttatattttaccggcgagaatcaatcgccggttttcctcaaacttaaaacccgacaatatctattcccacaccttcggctgatactgcatatgcgatacattataaaccgtaataaaggccttcggatcctcacgattaatatacgccatcagtttctgatattcgctcttatcaacaatcgtgataatctcattgtgtttctctttattataagcgccaatggcctcataaatcgttgcgccgctgtgcagctcatgaataataaactgtctcagggcttcttccttctcagtaataatgcagactctgcgcttgatattgtggtcaaaaataaaatgatccaacacaatgccgttgaaataagtgccgagaatactcagaactacagtctttttgtcatagaccagtgcagcggacaatgccacacacatgccggagagggacatggcttttcccagttccatatgtaaatatttattcatgatcttcgccacaatatccaggccgccggaagatgcattgcggttaaacaaaatacttaatcccacgctgacaaccagaatatagcaaatcacatccagttcctgacttcctgtcatggaatcataacccgcaaatatcttttcaaaaataccgataaatacaggcagcataatgcttgtataaacggttttcacaccgaattccctgccgcatgtcaaaaatccgatgatcagcagcaccacattcagaatcatggtaatcgctgacaagggcaacggcacaaaattcgacaagacaatacccagaccggaaatactgctgacagacgtatgactcggtacaaggaaaaaataaactgctgctgcaatgatcgccactgctgccgtcagaatgataatttcctttataacttcattaaaattgattttcttcatagcacaactttctccttctaccctataccttatccgctaacccagcacttgtcaatcttttttcattctaagaacaaagtgtgcgcttgtcgcacactttcgcgcgtgagcggatagcaccgctatatattcctctccgcgaactgcgctttctggcacacagtgcctttttatgtaatagggaattccaacagatttcctattacataaaaaaaagccccatactattcatgttacagaattgtatggaacttttttctaaatacttttaattaaccgaagtatctcttcagcagaccttcgaatgcttttccatggcgggcttcatcgcgggccatctcatgaactgtgtcgtggatagcatccaggttcagcgctttcgcacgtttcgcaaggtcgaacttgccttctgttgcgccgtgttcagcgtccactctcatctccagattcttctttgtgctgtctgtgacaacttcaccaagaagttctgcaaacttcgctgcatgttcagcctcttcataagctgccttctcccagtataaaccgatctcaggatagccttctctgtgcgccacacgcgccattgccagatacataccgacttctgaacattcaccttcgaagttcgctcttaaatcagccatgatatcttcaggtgcaccctgagcaacacctacaacatgttctgcagcccatgtcttatcaccggactgttctttgaacttgctggctggtgccttacagactggacaaaactccggagcgttttcaccttcataaacataaccacatactgtacaaacccatttcttcataattataatctccttttctcgatatgattttatattcgtgtttcgttttatttttaaataacagtaatcattactgttatcgttataatacacgatatccacgcttttgtcaatcactttttatcattttctcaaaacttttttatcattctgtcagttcaaactttctccggtaatttcgctgctccaattcatttatctctccaaaactactttcagcgctgcgattaatttttcattatccgcatggcttttgactgcaatcctgaaatatccctccgaaagatttctgtagttgctgcagtcacgaatcaatatgcctgctgcaatcaaacgttcctttaagtccctatctgctttcagcaatatataattagccgcgcttttccaatactgtaccctcagtgtatccaatgcctgatacaaatattctttttcttttctgatatactgcacagtttctttgacaaaatcatcctctttgagggctgctttgcctgctgcacttgccagaactgacacattccatggcggccctgcctgatacatccgatcgatcaattctgtatccgctgtcaaaccaaatcccagacggacaccagccatggcatacatctttgtaaaagccttcaatatcattaaatttggatattccttcagcttttcaactagagaattttcttcttcacgtcctgtaaaatccatgaaacactcatccagaaacaaccggattttattgtctttgcagcattcagcaattgatgctaaaatctgtaccggtatcagaaccccagtcggattattaggattgcacaaaaaaataacctccggcatttctcgttcaatcaacgtcaaaatatcttctttaatgcaaaaatcctggtgattcaaagaatacaccgctgtttcaggtacgtcatacgatgcccaaagactttgccaggctccctcatactccgcaaagcaaggtgccgtcaccagaattttcttcggtcttaccgcatacacataccgataaataacgtccgccgctccatttccgcaaatgatctgactgctgtctatatgatacttctctccgatggcttttcgcaggctgtcgctgtacatttccggataatgaccaatttgcccgatagcatcagcaattgaccgattcactgattccggagccccaagcggattaatattcgctgaaaaatccagaatattattgtattgataaatatctccgccatgtatattcttcatctgatttctcctgtctattcaaagtttctcttcaattcatctgctgcctgaatgatcacctgtcactcgcatccaaaattctcactgctacttcagttacatactcctctatttccttggcaataaaattgtccaccacataccgctcaatataaaacgactcagtctttaagtgatgctgttctttatattgcagcaatcgctcatatgtctgtccaatattcatccaatgccctacatgataagcagtaatatacctgcctcccggaagaatctcatactgacctgtcgcaggccgctcatccaccagcagaatcgtgttgtcatactctgtaaatttccctttttggacattttcgtcatattgaatataagctacatcataatcgctccgcatacctgacttcttgaattccgcaatcaactcgctggttttccgatagatggatttctccaggccatccgctacatgcccatacaaataatatctctcggaaaatgcctgaatcgtcacttccgaaaaatctgttttttctgcatctgcaattttctcccgccgcctggacagccattgtttcatcgctcttagcttttctatctctctgtcaatctgctgttctctctctgcaaaaacatgcatcacccgctccgggctgcgatgcgcaagcatatctctgatttctttcagaggcatccccaggtcccgcagcatccgtatggtatcaaatgtctccatctgataaatggaataatatcgatacccgttttccgataccttttcagggcaaaataagccaatgtcatcataatgaaacaatgtatcctttgaaacacccatggccgacgcaaactcacctgttgtcatatattcatgcctgtccattttatccctccaaaagcatttctgccttttcacgcatctaattgtaaatatttgtattccctcttgactatagggttacccaatagtatattctatcaaatgttgataaaagttacactatcttttgaaaggattttatttatgagtcactcaattaacggccattttacaccggcctctcttttaaaatttgccgcaccttccatcattatgatgatgtttatgtcgttatatacgattatcgacggtatttttatttcacgttttgtcggcagcaatgccctgtcctctttaaacattgtttatccaatcattaatattgtttttgccattggcaccatgctgggcaccggtggcaatgccattatcagccgttacatgggggaaggcaaagataaagaagccaaggaatgtatgacccagtttgtggtcatcagtctgctcatcagtgttgttattcttgtgctgacccatatgaatctgacttctatttccagaatcctgggagccagcgatcttctgctggctgactgcaacagttacctttctgtcgtcgtcagctttgcaccggcagccatcctgcaatgtctgtttcagtcttattttgttactgcaggccgaccaaaccttggccttgttctgacgatgatcgcaggtatcctgaatgccgttttggactatgtttttatcgttgtttgccagatgggcatcagcggagctgcccttgccacaggtatcggtcaatccattccggctatcgccggcctgctgttttttacattttcaaaaggttctctgcatttcacccatttcaaactccatctcagggagcttggacaggcctgttataatggttcctctgaaatgatctcacagctgtccaatgccatcgttacatttctgttcaatattgtcatgatgcgtctggccggcgaacagggtgtcgctgccatcacgattttactgtacggacagttcctgttcaatgccttttatcttggattttccatcggcatcggaccgatcgtcggtttccagtacggcgcaggcaacaaaaaagaactgaaaaatatccatcgtattgctttcctctttgtgggtatttcctcagttcttctgacaatcgctgccgttacattatccacaccaattgtttccgtctttacacatgatgcggatactttccggctggctgctccgggatttaagatttttgccattaacttcctgttcagcggtttaaacattacttcctccggatttttcaccgccttatccaacggtctgatttccgcaatgatttccttctgccgaacacttgtatttattgtattgagcttgttgattttgccgactttccttgacttaaccggcgcatggattgccattccggtggcagagtttctgacactgctcctgtcgacggtcatgcatgtacgatatttcttccggccgggaaaacagaattactttatttgacgctgtgaaaacaatgctgcgaaatccctagtctacgaaaggtgcagcaaaagccctattcaaagcaggcacgctcgcgctgcaccttttcgaattttatgctttcgcagctgtttatttagacttcattcaaatgtcacagcttttaaataaaaataaccgacactatttttcatccgcaagaaatatcttatgattttatttttatcaactatgtagaatacagatttatactgctttcctgcattctctgctattaaccagttgtataaggccattcatagccttatcgaacagtacagtataaacagaaccaaagacattggcgccgattcggagagcgaccgctcctgccgcaccaaagaggccggaagcgatagagagggcgccgaaggtattgaagactgtctgccatgcgtatcctgcagagtaaccaacaccaattccgccaatgatgccgatataaggatacatggatggtggaagtatgtaatacaatacaaggaaaatcagacagccgacgatgttatacggacctcgctttttggcacgttcgacaatatccgacgaaaacggcagacagacggacatgcatgcaatgccggcccacatggctctcggcagccccagcaatgagaaaatcagcaacgctgttgaaaccaccagtgtcagtttgatgtaccaccagtttctggccgaacgaatattgaattctctgaaaatatccagaaaatgtcttctgtaaggacgcttgcgctgattcttataaaaaacagccatacagatcagcatccccaccaacagactgataacacgcagataataggatctgccggtgacatcatatccctgaagcaataaatatcccagcacaaatgtggaatgattgtacataatgacattgtggcagccaagcagcattaatgtaaaaatacagccaatattaataacaaaggccgcccatggtgaaaccatattggagaccctcggtccgacgatcaaaatagcaaaaataccgacaatacacagcagaccatgatgcgtccgaataccaaaatccgcctggcgaagcaccagaagtgctaacagaaaaacaaccccggctacgctattgtccgatccgaagatcatgctgtataaggttaccagtgcaaaacagaatgtcatgaccagatagactttaaaattataaatcaaaatatgtctgcgtttttccttcttatctgttgtgtttttaattaattgtttggaacccgcggaactcaactgcaattcctgataaaatgtcattaatctttcatcctttcattaatcatattcttttgcttcatttttctatttcagtctgtgcgactattgacgcttcttatctatttgctattcgcgttactcaaaatcgtattggccgcttcaatgagtctgaataatttctcaaaatcatctgacgtcatctgttcccttaatgtgtacaatggatcaaggtaataataatacatccggtctacttcttctttgccatcatctgttacacgaataccataacttctccggtcgttcaatgttctttctttaataatcagtgctttcttctcaagactatcgattagacgactgataatcgtcttactgactcccatatccgctgccagctgtcccggtgtcatcataccacctgacaaagccactcgaaacagtaaatccacctcctgtgcagatgccagatcccctttactgctctttcgaatagccatgctgccaaaatgccgcaattctccctgttttctaatcatctctcgccaatatttgtccttttctgtatttctcatttcatatatcctgttcaatctttattgatgcagcatctttttgatacaccaactgatccttcataccattcatcagaagttttatatcttcatatcggagtactcatgccatccatttagttcacaatgtaaactatctagtctgtaaaatatcatactgcaaatttgtttcttcgtcaagcagaaaatggatgaaacctgcatcatcatgccacaggtttcatccatttttaatccgtgctacatctctgtttatttttactccttttaatgttgtgccagataactctttccggcttcatctgtttccaggatagcgtttttaaatttttcctctgatgcaccgcccggtacgaactgccactcgatcacgctggatgctttcttcacaatcttatccacatcttccgttgtcaaatccatttcttccagtgtaaccggcaatctcatatctgcgttaaatgccataattttatcacgttctctaatctgtccatcataggtcagcagacacagcacaccaaaggaaacgatctccccgtgcagatgtttctccgctgccggtatcgtagatacgccataataaacacaatgagcaagtgtactgttgtaataataatcatccttcggatccggctgtgcttcatgggtttcaaaatttgacacaatacctgttgaaatgataatatccaatgcaacctgttccagtgcaaaagatggttttctctgtcggcaatcttccaatgcctgtttgccgtacgtcagcagaggttctgtacaaatggttgaaatacaatgtcccatcaatggtgtatgatacatcggcttatcacgggttacaaaaagaacttcgtattcttttgaaagggcatcaccaattcctgcccaaaacaactctgcaggtgaatctgaaatgacttttgtattaataaaagtatgataagccggcgtcttcatataataatactctttaaaagatgcatcctgattgtatacaaccgcaatagctgtacatgcggcacagttagaggccagtgtcggaaaggtaaaaaacggtttatccaacatatccgccaaaatcttaactgtatcacaggcacgtccgccgccgataccaaacagcatatctgcatttattacttccgggtgcttcttcagtatttcaacattttcataattcgaatcaccgccataccagataaaatcagtaatttcaaaatcagtgccttccaaagcctttaataattccggcttcgctttagacatcgccgtctttcctccgatagcaactgcctttttaccatactttcgtgttacataaggaatctctttataacattcctctcctacgctataacttggcaaaaatatactataatttgacattctgatcaccctttccatttcatgtcattcattctgtttttcgaatattgattatgttattgtctgtactatatattaatcctgatttttttcaaaatcaagcattaaaaatgtcagaagcacatctctacttctgacatttcaattctttttaatttaacgcatcatacccgcattcccttgtccggatcttcatggcagaacgaatttcatagctgaaaatcttgccgtcaccgacttcgcctgtgaaagcagctttctgaatcgcagcaatggttttctgctcccattcttctgaggatacgacaatttcaaacttaattttcggcagcatcatcacatctacttccgtaccacgcacgcgctttttgtaaccacgctgtgccccgcaccccatgacctgtgaaacggttaccgtctttaccaaatattaactttgctgggcattatccgatgcaaatgacttaaatactttacaaaaatcctatttctccgctttctctttctcatactgtcccagtgcctgaaatgcctccttcgacaaaggatataggattgaaatattaaacaatgtcatcaggccgatgcccacatcacccagatcccatacaaatgtataggcggcaataccgccgatgaacagcataaccagcgccaatactttataggccatctgccagcaccatttatcaccaaaaaggtacgccacattagatcgggcataaaaaagaataccgagaaatgttgaaaaactgaacatagctaatgtgactgcaataaaaatcacgccaaatcgccccagatgaaattccatggccgtctgcaaaagtgccatacctgacagaccatctgtcactttctgcggtacaagcagcataataaatgcggtgcagctgcaaatcacaatggtatcgataaagacgccaagagactgaaccagtcccatggtcaccggtgtctttccctctgcagcagctgccgcacaaggtgcagaacccgaaccggcctcattggaaaacaagccgcgttttacaccattcatcagaatagcgccaaaacttccgccggcaaactgccggatgccgaaagcttcctcaaaaatacgctgaaaaacccccggcaatgccgttatattcattccgatgataatcaatgtgatcacaaaatataaaacggccatcaccggtaccaatacatccagcaccttgaccgtcgcatttttcctgagcacgatcaccgccgccaaaattaccagtgcgatcgttgtataaagcggcggaatgttaaaggcattgttaaatgattccgaaaccgaattactgataacctgactgataccgcaccagcagatcagacccgaaatggcaaataataccgccggcagaacataccttttcttcctgccttctttgcgctcgaaaaagcggtgaatataataagccggtccaccgcgataaccgccgtagagcgggtctttttctttataaagctgtgccagtgtggcctcgataaaagctgtggcagaacccaaaaccgccatgatccacatccagaaaacagcacccgcaccaccggcagaaatagccgctacaacacccacaagattccccataccgacacgggtggccgtggatacaatcaaagtctgaaaaggtgacagaccattttccccactcttttgtttcgtcagggcacgcaccatatccgggaacaggcgaacctgcataaaacgcgtacgaatcgtaaaataaaccgccgccggcacaagaaataggatcagcagtgaaatgccgatagaaccgccgaccggcagcggaatttgaaataagtcgccccacagaaaattgtaggtggcttcaataagctgtacaataaacattctaaatttccttccctaaatagcaaaacgccatagttattaaaagttgtgctttatcactttcacctttaacagtatacagtaaaaaagttaaaagctcaatataaacttctcttttatgttttatctgaatctaattcatgttacaataaaattcatgtaccagacacatgtgtctgcttccgaaatacagcatttctcactttgtgtcgtgtttccggcagatattttattttaccctgtcatcaaggaggttacagtgtgaatcaacaaaaaattggaagtttcatcagagaacttcgaaaggaacaaggtatcactcaggaacagcttgccgaacaattcaatgtctccgccagaacgatttcccgttgggaaaccgggcataacatgccagatatcagtctgcttgtggaaatttcagaatttttcgatgtaagtattcctgaaatcatcaatggtgaaaggaaaagtgagaatatgaacgaagaagtcaaagaagtcgctgaaaaattatcagattatgcaggtgaagaaaaaatcaatatgatcaagaatgtcaggaatttaagtattacaggtgtctgcgcgctcattctctgttatattcttgaagctgccggcgtatccggacaaaatagcttctttgaaaaactgtatttgtattgcgaaactttagtgccggtaacgattactatgattgttttttattcaacaggtttgattaataaactccatcgaaaaaacagatcgtctgtacttgataattttcctaaagcaatccgaattatcattactgccgtcctggcatttgccgtggcagcgcttcttaaactatttctgtcaaatgttctgggattatagactatctcataggtacaaaacaagcggccgtgagttttctgctcacggccgctttatataatctctctcttaaatatttttagtttactctctcatacagcaccatcatccgatgtatcttctgtgccagttcttctgtgaacactcccggcaatgcccgccactgccagttccgccccacagtggacggctcgttcattctggcttcgctgccaagtcccagaagatcctgcgcctgcacgatggctgtgtctgccacactgccccacaaagcccgcatcataccccagtgatagccttcctcttttgtcaatcggaagtattctctggcccattctgtatcaacaggatccgcggatgcaaaccagccttgaatggtatcattgtcatgggttcctgtataagccacacagtccctgataaagttatgcggctgatagccgttgccattggtatccctgctgtcaaagcccaattcaaaaactttcatgccaggaaatccgctgtcagccaaaagtttcttgacagagtctgtcagaaagcctaaatcttcggcaataatcggttgtttaccaatcttggcttccaccgcattgaaaagtttcatgcccggcccctgcttccagtaaccgtctttggctgtctcagcgccatacggaatcgcaaaataagaatcaaagcctcggaaatggtcgattctcagtacatcataaatatgacagaaataatcgattcttccaacccaccatgcataatcatcttctgccatcttgtcccagtcaaagagcggattgccccacaactgtcctgtggcagaaaagccatccggcggacaaccggaaacttccttcggcatcagattctcatccagctggaaaagttccggatgggcccagacatccacgctgtcctgggaaacataaatcggcagatcaccgataaaatcaatgcctttgtcattgacatactgcttcagactcttccactgacggaagaagaaatactgcagcactttccagaaagcaatctgttcagccattgtttcgcgtactttatcaatggccgaatgatcgcgtcttttcagttcatcctcccactgccaccatgaacagccgccatgggtatccttcaatgtcataaacagcgcataatcttccagccagaaagcctgcagctcgcaaaatgtctcaaaatcttccggttcattttccaaaaaacgttttgcggccaattttaaaaccggatagcgttgttcataaagtcttccataatcaattcgtgatacatcatcaccccaattaacagatacatattcttttttatccaaaagcccttcagacgccagcaaatccaaatcaatgaaataaggattgcctgcaaatgtagaaaaggactgatacggcgaatcaccgtaactggtcggacaaattggcagaagctgccaatactgctgtcctgcatcgctgaggaaatcagcaaactttcttgccgctgcccccatcgttccaacgccgtattcagacggcagagacgccaggtgcatcaaaataccgcttttcctcactttttctcatctcctttattctgtactgacagagcgcaggtactttcaccccttataaaaagtgacggaattctctcatacgtcaccggaagctcctcccggatattgccaagcagtatctccagactacgtctggcaataatctcactatcctgcttgatggtcgtcaatctcggacacatatactgactgagtacaataccatcaaagccaatcaccgaaatatcttccggtacccgaaggccccggtctttgatggcccgaatggccccaatcgccatcacatctgacatagcaaaaacggctgtcacctcaggcatcttgttcagaattctcagcatgccatgataaccatcttccatagagaatctggcaccttcatactgtcggctcctgtcaaaattccgtccacggagttcaaatgctttccgacagcccatatatctggaccttgctgcgtaagaattctccaatttgccgcctaataccccgatttctctgtgtcccagcgtgaacagatactctatcgccgtctgtgccgcgccttcatcatccgtactgacgcttgaaagattctcaagttccatcccctctgccgagttcgtaaccagcagccccggaatgccggcatccccaaaacgaccgcgataatactctaaatcgctgcctagaaaaagaatgcccatgggctgccgttcacgacaaatctgcagtgcctgttcaacttcattctcatcctcatcaatatagtagatcagacagacatagccacgctctttgatcaatccctgaagcttttcaacaatcgttgcaaaaagcatgttattattacctttgacaatcactgcaataccactgttagactgctgtttcagatgcttcgcattattgttcagtttaaaatgattttttttgacaacggccatgacctttttcctggccttgtcagaaacatccggatgattattcagtacccttgagactgtacctacggaatatccggcttcctttgcaatgtcttttattgtcacagtttttacctctctcttcaggtgtcagattcaatatctgtctgcgaatcctgatacagaatgtcagtctgcttcgcagacacatttctcagcaggatttccgcatacaattctaacccttaacagcaccggctgcaacaccctcgataatatatttctggcaggcaagataaaagataataacaggaataaccgccataatcagcgccgccatgatcgcgcccatatctactcgtccataactgcccttcatatactggattgcgatggaaatcgtcttatatttattaatatccaaaacaagatatggcagcaggaagtcattccagatccacattgtctcaagaataccaactgaaatataagttggctgcataatcggcaatacaactgagaagaatgtacgcaccggattgcatccgtcaatcatagccgcttcttctatttcaataggaatggatttaacaaaaccgcagaacataaagacggccaacccggcaccaaatcccagataaataataatgatgccccaaggtgtatttaatttgagacggtctgcgatcaatgacaatgtaaacataaccatctgaaatggtacaaccattgagaaaacacataataaataaaatgcattggtaaacttattcttcactcgggtaattgcccatgcgcacatagaagtacagatcagaataacgataacagaacccacagtaataaatactgtccatcctacagccttcagcaggccatactgatccaacgcagttgtatagttgtccagaccaatgaaattcttcgctgacggaagcttgaacggttccagattgataaatgatttcttcttaaatgagttaagtaatacaataataatcggtgcaatataaatgagacctaatatggtaaaaaagattgtaccgatccagctcaatgtctttttgttcttcatttactgctgcacctccttcgaacgtgttgctctcagctgaataagaccaatagccacaacgatgacaaagaaaataaccgctttggcctgcccaacaccttcccatcctgaacggccatagaatgtgttgtaaatattcagcgccatcatttcagataatttggacggctcaccagctgtcaatgacaggttctggtcgaaaagcttaaatccgttggtaatagataagaatgtacaaatcgtaatagacggcatcatcatcggaatggtaactttccataagcactgccagctgttggcaccgtcaatctgtgctgcttccataacttctccaggaatagactgaagtccggcaatatagatgatcatcatataaccaatctgctgccatgataccagaatgatcagtccccagaagcccagccactggttcaatgccaacgctgtggaatattttgcaagaataccgttaaaaatcagctgccatatatatccaagaacaataccaccgatcaggttcggcataaagaaaatcgtcctgaagatgtttgttcctctcattttcctcgtcagagccagcgccagtgcaaaggcgcagacattaatcactattagtgatacaatcgcaaaaagtgccgtataccaaaacgaatgtctgaaaattgtatcctgaaatgcttttacataattgctgatacctacaaatttcgcatctttgactgtcgtgaattcacaaaaggacagtccaacacccataataaacggggcgataaaacctatgataaatgcagccagagtcggtaaaacgaatattggaagataacgtttaatggccttttccacaaaatcaacctccctcttaagttgataaaagtgcgagtccaaatatgcctggcagattctacccgcataaaaaaccagtgggcgggcaagggatgcccgcccactgtcttttaatctacagttacgatataaaaccgtttgcgttcctgattatttggaagctgctgcttctttagcccatccgtctacgaatgcacttacaactgctgcccagttatcatctgtctggtctgctgcgtatgttgtcagagcagaaccaacaccgttcttccattcttctgaaggcattgtggagaatgtccatgcaactggtgtatagccatcagctacatactggttagcgatgttaaccagaggattggatgattcaaggttgcctttgaaaggaataacaaagcccatgcctgcgtcaccggatggcattgcaccttcgccgccgcacatagcttttgtaccaacttcagatgttacacaccagtacatgaaatcaagtgtagcctggatatctgcttcgcttgctttgttgttaacacaccagtagttctctgtacctgtacaaaggccctgtttgtcttcaccttcagcaccgatgtagattggcagcatgccaaggttgtcatcaccgagttctgcaacatcgttgtatgcccatgtaccattctgatagaatacagcctgttctgttacgaattcagcaactgcatcatcacctgtctttgtggaaagaagggacggatcacatgttgcgttgttgatgtaaagatcccagatatttctatagttgtcaaggtatgtacctttgatggcatctgttgtattgatgtcgtctgctttgtattcatagtagattggaagatttgcaagatgtgtcttgaatctccagtcagaagagccatccatacctgcagatgtaaaggctgagaagccaagctcatccttacgtgctgtgatgtcttcagcaactttcttcagatcatcaaagctcttgatatcatcctgtgtataacctgctttttcaagaagggctttgttgtaaatgatgccgtatgtctcgataacatagccgatacctgccatagaatcgccatccatcagagcaaattcatcatttgtcagttcacctgcgatcttagaatccttcagatcgtagcagtaatctttccaagaagccagaccaacaggaccatttacctggaataatgttggtgcatctgtcttagccatctctgacttcagtgttgtctcataattacctgatgcagctgttaaaactgttacaggaacaccagtctcttctgtgtacagcttagccagttcctgccactgtgcatcctgttcaggcttaaagttcagataataaaccttgccgtcgcctgctgctgtgctttctttcgctgcctctgttgcagcctctgttgctgcctcagaacctgcaggagcctgtgtctcttttgttgaagagctgccacagcctgcaagcatggaaacactgagtgcgccaaccatggccagagctaataaacttctttttttcattatgattcctcctcgttttaaagataaaaccttcccggaaacgtttctggaaacgtttccaactctgtaattacatcatataccacttcaacaaaaaaagcaagagaattctcttgcttttttgtcaaattgttagttattcatattttaagtctctgtttttgtgcagtttgacatgagtttcccctgtattttccaattgaatcatatacttcgtcctgtttacgactatataagacaccacctgaactactcttgtgattggccccaacatcttatgattgcattccgagacaccgtgccatatctgcttccggtgttgtcaccgcaccgatattgtaggtatccaccagaatcttcagtacatttggtgagataaatgccggcagtgtcggtccgagaagaatattcttgatgccgagatgcagcagcgtcagcaggatgcagaccgctttctgctcataccaggacagtaccatggacaacggcagatcattgacaccacagccaaaggcattggccagcgccactgccacctggattgcgccataagcatcattacattgtcccatatccataaggcgaagcagaccgccaatggttcccagatccaaatcgttaaaacggtacttaccacaggctaatgtcagtacaatgctatcctttggtgtctgcttcacaaaatccgtgaaataatttctgcccggtcttgcaccgtcacagccgcccaccaggaagaaatgacggatatctccggctttaaccgcttcaaccactttatcagccactgacagaattgtgccgtgaccaaaaccggttgtcacttcatgcccgccgttgatgccggtaaaatgctgatcttccttataaccaccaagttccaacgctttctcgatcaccggtgagaaatctttttcatcgccgatatgcacgatttccggataagacaccatctctgtagtaaatactctgtctgcataacttgcttttggcggcatcagacagttggttgtaaacagaaccggcgctggcatattggcaaattctttctgctggttctgccatgcggtaccgaaattgcctttaagatgcggatattttttcaactcaggataagcatgagccggaagcatctcgccatgggtgtaaatattgatacccttatcctttgtctgctccaaaagctgtttgagatcatacagatcatgacctgtcacaacaataaacgggcctttttctacagttaaaggaacagttgtcggctccggcgtcccgtaagtctctgtattggccttatccaagagtgccatacacttcagattcacttctcccacttccataactaccggcagaagttcatccactttccagttttcaccgatgacaaaaagagccttatagaaaaattgattaacatctttgtcagtgtatccaagcacagcagcatgataagcataggccgccatacctcggatgccaaaaagaatcagcgattttaatgaacgaatatcctcatctgctccccagatgcccttcatatcataatcttctgttctgccgcatggagaaccgcatgattcacagtccggcaccagtttgtgcttctcctcatgcacacgatcgatcagagcgttaatggtttcattattaaaattcacatttgtgacggttgtaaataatccctcgataatgactttatcagtggaaggccccggtacatttccctctgccgcacgggcaagaccgatgagtgcccctgtcagttgatcctgaagctgtgctgtatccgcctgcttgccacagacacctgctctgcctgtacatccgccgcatccggctgtctgctcacactgaaaacaaaacatattattttccattggaatacctccttgactttatgcacctatcatagtatactttgcccaaaagttacgttgtaattccaacaaaaggagttcttttatgagagaatattttccagtgataaaaaaatcagcactttttcaaggtatctctgaggatgatttagatggcatgctgacctgtctcggcgcacggactgcttcctattcaaagaaccagccgattttctgggaaggggaaccggcaagtcttattggtgttgtattaaccggcaaagtccagattgccaaagatgattttttcggcaaccgcaatatcatttccatgatggagccgtcacagctctttggcgaagcttttgcctgcgccggcatagaaaaactgccggtcactgcaaccgcagtgaccgacagtgagattcttctgctggactgccgccgtgtcatcaccacctgcggcaattcttgtgaatttcataatcggattatcgccaaccttttgcgtattgttgccgccaaaaacattatgctgaatcagaagattgaactgacttccaaacggaccaccaaggaaaagctgatggcttatctgctgatgcaagccaaacaaaataaaagccgaatttttgcgattccttatgaccgccaggagttggcggattatctcggtgtcgagcgcagtgctatgtccgcagaactcagcaaattgcgccgggaaggccggatagattatcataagaaccaatttaaaatattagaataactttacttttttatctcgtctgtttctacaataaaacgtacacttccggtttttcctttttcaagaccagagaagttgttgtactgctcatctgcttttttcagagcacggacacgggtgatgatattttccaggtcatcccctgccagttttttcagttcctgaatgccctctttgtcaaattctttcatgccgtcactgagggcatctgttccctctgacaggccatcaaatcctttagagataacatttccggctgtgataagctgtcccgtaccgtcatttaatgccaccgctccctgataaagctgctcaataccatcgttcaaagcctgcacgccttcggtaagctgaccgctgccggaggccaggctgctgacaccggattttaactgttccagtgtgcctgagagtccggacatctgtgtgccaagattcgacaaggcttctgaatactgtcccagtacctgcagctgtttctgcatatcttcaaccaatacggtaattgtatctgtacccagtgaaaactccggaatttcaaggtccggcatatctttcagcgcatcttttgcctcagcaatctttcctgaagccgtatccgttgtatcggaaattgaaatgctgtctttcacttttgactgaatttcagctttctgatcatctgtcaaatctgtacccgcaagagcctctttcacagcctttgatgcctgctcttttgcttctgattctgcctttttctctgcctcactcaaatccactgcatccagtgtaccttttgcctcggaagtctttttctgaacagattccttataagattttgcatcattggcaaaggttttcacatcatttaacgttgactgcatgactgtcagcgcttcttttaattttgctgtatcctgtgccagtgctgctgcggctgctgacatcggctgcatatccacagactgtccatccagattcactgttgccaatgactgattcaatgtttcaagtccctgctgcaggcctttggcaccttcaagaagtgcgcctttctggtcattgacggttttcagccctttcattaaacctgcggaaccatcatccattgcagatacccctgtcagatactgtccaaaatagtcacccaattcatccgcaccatctgccagctctgcagcgccgtccaccagtttgtctgaagcctctgataaatcatccatggcatcaatcaggtcatctacatctttcaggtcatccgtatccatattgccgaacataccgttgaagataatggttgctgtgaaatccagtgaaaaatctgtcacatccgctgtcagttccacatattccggaacatcaacatcttctgtggcttcataattcttcaactgcagactgtcggaaagtcccggcatggcataaccaattacaatgttctggtcatccatttccacggttttgccgttggtcacttcaatattactgaagttatccgatgacaggaacatggctgagcacacaacaaaaggtgtggatacctcaactgtctttccatttacttctactttctgagaatacttgttggtataatcaaaacggattctgactttgccgctttgtccttttaattcatccgcagtcacctgtttgtcattcagataataagtaatcttgacatccaccggcagagcatctgtagaagtacctttatattgaatgtcctcaccatgattttcccatacaaccacgttgctgcccttctctgtaaattcttcgtcgccttctgtgttcttaatgtcagaaagtgtcgaataatctgtgatttctccctctccttcatttttcagcactgcctccacagacacatcataaattttgccggatgaatctgccttggcatagacagtttccgttttatctgttttatcactgcctttgtcagcgcttttatcgctatccgatacctgagcattcttactgccgttcttatctgcatctgttgtcttggtttctttatggctactattgtcagtatcagctgaagtttctgctgaaacctcattctccgctgctttgacctgctccgtacaaccgctcacaacagacgctatcaacgcagccaccacaagcaccgctgttaatacgagcattcccgccttatcttttaatcgcttttttattttcatcgcactgcctcccgtctattccacatttttaagcgctgtatccatcggaatcttctgaatacgcctgtactccagcaaagcaaccacaccataggaaacaacacccatgataaacattttgacataaattgatttgccaagataaatcggaatccatccggacatactgttgatcagcatccaccgaaaaatataaaccagtccttcataaaccaaaggcatgctgatcagtatagacaccgccaccacgataaatgtagaaataatatataaccggctgatttcgctattcgtatatcccagaatcttgttcatggaaatggactgggcatttttctcaatgatgattttggatagcaaatacatcaatacaacgaaaatcagcaccgcaaatccatctatcagatacatcatactgcccatagactgatccaactgacggctgattctggtcaggtcatcgatatcaatcagtgaaccgatatatttggaatcaatgtctgttatttcgctgttagaaaagtaaccgcaaaaatagtcactgcccagatcaaacatgtcgtttaatgcttctctcgacataaagacgtccaatgcaccttcgtaatcataaatgcccgttaccgtcaggttatagctcttatcctcataggtttccttcagagtaatcgtatcccccggctgcagcaaatatttatctgcataagcggatgaaatatagacatccttcggctgcagattcagatgaatatattggctgtccggttcaatgccatacagcagcacttcttctgtcctggtggcattctgctgcattttcagtgaataggcactgaatttttctgcatctggattatctgtttcaactgaacgactgaacatcatcatattcaacatactttccagcttgtgatcctcatccaccgctcccacaggcatctgaagcagatactgataattggccagcatattgtcgccaatggtcgctttgtaatgatcaagtactaccggcaatcccagtccaaagagcagcagcatattggcaaataatatgccgacaaaaagcaccagataattgctgagattctgtagaatgaccctgatgcggaatcgattaaaaaacggaatatgcacactcaacggcaacgcatgtttctgttttcttctgctcagatcacgtctcagaaacttcagcggtgaaagtgtcagtttgtaagacaataccgcgaaggtgatgactgccatcagcaccactggcacaatggtggtcaatacaaaggcttccgagttccacaatgtaacataggtcggcaaactgtagctgccgtaatacatgcccgcacaaacatctttcaaaacagtgtatcccaaaatattgccgataccagcaccgatcaaagtgacaaaaatcggcaccatcatataatgccgcaccaactcgcttctcgtataaccggatgcccgaagcgtgccgatgacattggcctctttgctgatggtgttgctgatgatcacactgaacacaaaagccatgatcacaataaccatatacagcaggacaatcatcatgcctctgtcactgcccatatcttcaccggtaaaattaatcgcctgattcagataacgcggtgtatagctgtccagtacaatagtgctgttgatatctgacatcaaatcatccgacatttctttctcttctatgttgttctttggtgattgattgtatttccatgcatactgccaggtcattttagactgatccagctgtgcaaagctcttctcagccacaatggccaccccaaacttgatcgcatcaaacattgaatcattattgtccgagaataatgcgctgtaatcagacaatgccaccaatcctgtcactctccagctgtgatctgttgatgcaatcacatcgcctactttcagactgttgttgtccgcatacattctgtcgatggcaatttcgtccgatttctccggcatacttccttccatcagacatactttatcgacgtccttgcgatctggaaaaattcgaagcgtactatcattcgtcactaacgtttcttccacataaaacaaatcataaagtgtcactcccagagcttcaacattcttcttctgagccttgttcatctgttttacaactgtgaaatggccgtcttctatattgtatttctcaaaactttcattatatgccgtcagcatactgccatctgccacaaggaaaccggatacaaacccgatggttgcgatcagaagaatcaaaatcaccagatatttgcccaattctccttttaattcccttgtcagacgccgattcagtggattcttcatctgtaccacctcctaccagtccaatgcatccgccgaaagtttctgctcattcagataattcttgcggatcatgccgtctctcagacgtaccacacgatccgccatatctttgatggcatcattatgggtgaccataatcactgtgttgccgtatttctgattaaccttctcaatgagtttcaggatttctttagatgtattgtaatccagcgcgcctgtcggttcatcacacagtagaatatccggatttttgactatggctctgccgatggccgttctctgctgttgtccgccggaaagctggttcggcagcttatttctatggtcgtaaagccccagtgtatgtaaaagttcatccacatccagcggcttctcactgagataagccccgacttctatattctccctgactgtcagattcggaatcagattatacatctggaaaatgtaacccagatgctttctgcgatacaatgtcagcttcttttctttcatatctgccattctttcacctcgaatgcagatatccccgctgtctgcctggtcaataccgccgataatattcaaaagtgtcgatttgccggaaccggaaggccccagaagcacacagaattccccctgctctacgtacagatcaatccccttcaacacttcaacccggctctcccctgagccgtaagattttctgatttgattgatttccagaaacattcctctcgcctctcttcattctatattgactgtttttcgccgtaatattagttatctctaaccagtgtatcatacaacgacggcggtgttaaaataaaacagcataattgataaacattctcaattatgctattttagacaattataaacttttctcatttcataggcctgctgcatgcatgattgatgaatatgtgccatgtgaagatattctttcccagattaatgctgcaaaatttgcactccataaggccggacaggtcgtattgaaggggcacatccagcattgcgtcagatacaacattgaacacggtgatgccgacaagaccattgcgaactttaccaaagcggttgaacactttgccaatatgcactaaccaaaaacaagagcaaaaatgattctctcaaaccatctcgctcttgctttcttctttgttactcttttataaactgtttaacttttttactcaatagccctttgatgataaacatcattataatgccacaaatgtaccttggaagccccgacaacccgcaatatcggcaacgaagccaagacctgtacaatatggtactgagtcggcatatctttccactcaggtatccaccattctaaagaagcatttccccatactcgttcaggctgaggcaaaggtttggcatcctcaggtgcaggaaatgtttttggtgttattgtaacatattgcacatcagccttattgaatcctgcctctgagtgcggaatgtacttgtaatgcatgataccttcattctcctcatcaaaaagtactttctgcatttcacttaaatcatccggcttttcgtccattttaaaatgtaatttaaggaattcaaaattccatgatgataatgccgcataggttccgtcttcttcttcgcatatatctgtaatatctgcatatattttcgagtatcccagctgctctcgcccgcaaataatagggtctgcatgattttcccagattgccagctgatattgtccctttatttcatcatttgtgccgcaataagtaaccggtacattaaatgttgtaacattatacccatgtccggccaacacacactgtcccatcttgtctgcgtcattcgatgtccaaccatattcataccgtaatgatgccaatgtcagtgtcggatctttcagcatctcctgcttagccagaccaatcgtacgctccgctaggcactcaaaaataatataatccaaattgctacgacacaaatggttgtttattttttctctttatcttttaaagagagtactgcctctacctgcgcaatcaattgttccttatctggcatatacgttacatattttgatgcaaaaatattattgctcagaccgcccagtgcatattgcatatctacatttcctttatccgtacataaaattaatcctattggcgggttatcatcttcatcattaacttctgctgcatagtaatttaaatacatatttaactgtcctactgcttccggcattaatttaatcgtttttaattcaatcaaaacatatgattttaatattttgttataaaacaccatatctacataataatggacattgccaaatgtcactctttgttgtgtcccaacaaacataaaaccttttcctaattctaataaaaatttttctatttgtctgacaagtgcttcctccaaatcagattccatcatcggcttattttctggtatccctaaaaattcaaatacgtaaggatctttcacaatatcctgtggttttacaatttcattaccttttaacgacaattctaatactttctgcttatttgccttcccatctgataacagaagtctttcaaaaagcgatgacgcaatttgccttcttaattctctgacgctccatctggaatttgcgcattcaatttcgtaaaaatgacgtttagctttatcagaaattgacaaaagttcacaataatgcgaccaacttaagcgttcagacactgtctgaacgctgccatattctttataaaatgtaatcatattccaaatattggcacgtgaaaacctttaccaaattttctggtaagttcttttgagagcatagaaattgttttgttttgataattctcttcattttcatgcaaattaatatcttcgacaagcagtttccctatttccatatacgttcttaggagggtattattcacttcaactgcaacatgtgttcttgcttcctgaagtaatttttctattttatttatcatcttattatctactaatttgtccatactttctcctataatatcaactaacttcactacacctattatatccgttttcttctaaatatcttctagcagattcatcacaaaacctccagttgtatggcatccataatcttctttccacccttgactttttcagcataatcctccatactgaaaaaatccatatcattaattatccttcggtaactgccaatcacatctttataataatcaaaaggtattcttcctctaaatcgtattaaatccaccagcaatcgctcacgactatatattggaatctttacgctctgatactctataaggcatttgccaatatcatacaaatcatcattaacaaaactttgctttacccttttatcttttatccttgaatcttctcttttcgttgtcaaacaataatagtccggtataatatcagtcaagccataatagtaatacgcactgctccctgcaaatatcgctctcggatactttgcagtcatcagttcaagttcagaacatatctttttatctgaatataaccccttttctttttgaaataaaatacctgcttctattgctttcttaatcctgtaatctgttccatacttttcaagacactgcctatacgtcaatatcattctgtcaccccccttcgttttaagtaaaattacactcgttcttaatttatgtgtatttttgctttaattataccatttcatttaataaattcaagtaaaaatacacttgtttttatttcatgtgagtttttactcaaatcaatagaaaagcaagagcaaaaatgattgtctcaaccattgacgttcttgcctttatcacattaaatattatcttttttacaacatcccagctttttcccaccgcctgaattccgtccgtgccaaagccacacacagcagacaagtaactgtatctgccgcaggtgccgccagcagtgccccgtctaatccaatcaatctggacattaccagtgccaaaggaatcagtaacacgccctgtcgaatcagcggtacaagtaatgatcttgtcggcttcccgattccctggaagaaggaacccgtcgtcatatgcaccccatacaggaaaaaagccatcatataaagtcggaagcaatgctgcgtacagtcaaaatacagctgattatccgcaacaaacaatcctgctatctgtcttgaaaataccatataaaccagccaccatacagctgaaataacgactgcaatgccagtggccagacgataggtctggcgcacacgctgataattcttcgctccgaagttatagccgttaatgggctgaatggcggaggaaacccccacaaacatggaatgtgcaagctgataaactttcatcatcatgccataaacagaaagcgccatatcactgccgtaaatgctggcttcaccgtaaacacgcatgagattgttcagcacgatctgtaccagcgccgttaatccctgagtcagcaaactcggaaaaccaagctgcagaatcatcttcagcaccggccaggtcgggcgcaatgcgcccttttcaagctgtacagattgtaatctgcgcagatagagcagacataatatgcctgctgccatttctccaatcaccgtggcaatacctgcccccacgacccccatcttcaacccgaaaataaatacaggatccaggataatattgacaactgcaccggccatcatacatttcatagtatattgcggtgatccgtccgcacgaatcatcgccgtaaaagccggacaaatgagctgaaacgggataccaatggcaatcacccgcatataagccagcgattccccataagccgtattcgttgttccgaacagcgtaacaatatgcggcgcaaatataccgcaaatgaatgccagcgcaatgccgctggcaacaatccaggtcactgcctgcccgaaaatcttattggcattttcctgctcccgacgtcccagacacagactgacattagccgcacaaccatctcccagaagcagtgaaaccgcgttgacaagaattgacagcggaaaagcgatattgatggctgccattcctgtgatgcccacaccctgccccacaaaaatctggtctacaatgttatagatgtaattaaccatcaaagtcagggttgtcggaacagaatacctgaacaacaacttcgtaagaggttctgtttccaaaggacttctgtttgtctgcatatttaccattctccatcccctcctcaatcatcatgacattttatctcagtcgagaagaccccccccccacctctttcaggtggtgagtaacagcaaatttgtgtcagtgggagtccaatctccgactgagataaacgctccgcgaggatgcgcagtgattctgtaaagaatacgtcagcttacgctgaccaaaatcacgcgccatgtctcgcggtcgctcgacttgaacaaaacaaaaagcacccggcagctattacttccaaaagaaataatattgataccggatgctgataggatgacttggatcaaatgagcagaaaacggcatccggcactcagccggaaagcctccttctcccctccagactgactgttggctccggaattacaccgaattagccgaatggctcgcgggctgtcaccgccagtagagaacatgctcatttccgaagaaaactttacttaacttcaaaataacatacttttcctgggctgtcaacggctgattgtaaagtgaaaaatttcgcacatttcatcttgacacctgtttctaaaagtgatatatttatcacacagacaagtgagaaatatatcacttcaaaggaggaattttgtttatgagaaaagtatcattacgggaaattgttgctgataagattgtatttgccatcctgatcgctctttactactggatgtgggcaagaaatgactggcacaactactatacatcaattcaatacgctgtctttgcctttaccttcttctattttatctcccgcgcatcccgccttaagaaatacaaacaggaactgccggatgaaatgtctgaggccaacctaaaacgctgcgatgccctgtgtcttaaaatcggtgccgctgcaatcattgttctgagtttcgtctgtgctatcggcagattgtcaataacaacagacctcattggctattgcctgatgggtatcctgattgctcttgccattatacgcacgattctcttctacatcatggacaccaaaggagtatagcatggcacttttgacaaatttaaaaacatatcgggaaaaatataacctcaaacaggccgacctcgccgaactggtgggcgttcgccgggaaaccattgtcaatcttgaacggggcaaatacaatccttccctaaagctggctatggatatcgccagggtttttcacacaacggttgaggaattatttcagtatacggatgaataatccctatataaatcgtcattttttcttaagagattcgttcatttatatctcctaatcatatgttatactactcatgaaaatattaggatttcagaaatttcacagaacggaggtcggaaacattgaaaaaatatttattatttttgggtatcatcggtctttttgccttaaccgcatgcggcaaacaggtcaaaatgtcagatgtcaccattgattatggcagctcctctatttattccaaagaagatatggatgccgccatcaaggccattaaaactatattcaaggattttgacggctgtgaactgcacagtatttcctacagttcagatgaccaatgcaacactcccgatcatattgcctggatgaacgaactggaagctgccaatgataacaaggaaaccttcgaccagtgcattatgtttacaagcgattttcattctccgaaaaatggcggcggtgcatggaatcctgatgaagaatataccggctggcaatggtggctggctcgttctaatggcggtaagtggaagctgatgacatggggatattgaggcttctaaaaagaaagattatttcttcaatatcttccgaatatccgccagtctttccaacgccgcattcaatgtatcgtccttctttgcaaaatggaatcggatgtactggttcacgtcttccctgaagaagctggaacccggaacagcaccgacgccgactttctctgccagatccacacagaattcatagtcatctttataaccgaactcgctgatatctaccatgacataataagccccctgaggctctgtgaaggtcaaaccgatgttttttaacccgtctacaaagaggtttttcatatgggtgtaatggttctgcagttcgatataataatcatcaccgaagttcagtcccggcacaaccgcctccatcagcggtgctgcagcgcctacggtcaggaagtcgtgcactttcttgactctgtcaatgacttcaggcggtgcaatgacataacccagacgccatcctgtaatggaataagtctttgaaagggagttgcagataattgtacgctcacgcattccaggcagcgtggccatataaatatgtttattcggcttatacaaaatatgctcatacacttcatcagtaataacatacagatcatatttaatggccagatcagcgatgatcttcagttcttccagtgtaaagactttgccacatgggttggacgggttgcagagaatcagggctttcaccccatcctgcttcatggcatcttccagtacattggcatcaaagttaaattccggcggatttaacggcacataaatcggctgtgcgccggacagaatcgcatctgcaccgtaattctcataaaatggggaaaagacaacgactttgtctcccggattgcagacggtgagcatggaagccatcatcgcttccgtactgccgcatgtgacaacaatttctttattcggatctactttcatacccgagaaatgttcatgttttctcgcaagggcttctctgaagttctgtgcgccccatgtcagggcatactgatgcggtccgtgcggtgcgatttcacgcagtctgtctgtgatttccttcggcgggtcaaaatccggaaatccctgagataaattgacagcaccatattgatttgagactcttgtcattcttctgatcaccgaatctgtaaatccggcagttttatcacttaacggtttcatatatctgtactcctttagacattgtaggaaatgcctgcatttaaaatatttttctcatcaaaagctgctttcacacgcttcatcaatgcaatgttttccggctttgatgctttcagcagatatttctgcttgctcagtccgatgccgtgctcgccgctggccagaccgcccagtgcataagctttatcataaagaacagtcagattagcgtcaagctctttttcccaggttttatcgtctctatcacctctgacaacacacaaatgcacattgccgtctccagcgtgtccgaaactgatcatgcgcataccacattctttttcaaaggcgttgacaaaattgacaaaggcatcaatctggttaatcggcacaacgatatccagcggctcctgctctgaaacagcctccacgcctttcaccagcataccgcggatcttccatactctggctgcctcctctttatcctccagcggaagaatggaaagggcaccgctttcttttgccactttgcgaagttcttcgaggtggtcattgatttcatttctgctgccgtcaagggttgtcagcacataggcgctggcctccggttcagggaatgacattttcagataatcttcccccagctgaatcactttacgctcaataaattccatggctgtcggattcaaattagcctgaataatttgtctgacactctcaatacctgctttcagactgtcgaagctgagaaggacactgagactgtcttccggcttcggaatcagcttcagtatacatttggtgatcaccgccagtgttccttcggaaccgataacaatctctttcagatcaaggccggatgtatcttttctattcttgccgcccgccatgacaacggtgccatctgccagaaccagttccacccccatgacataatctcgcgttacaccgtatttcacagcacgcataccgcctgcattggtgctgatatttccgccgatggtggctttcttttcgcccggatccggtggatagaataaacctttgctttcaacataggcctgaaaatcttccagtacaacccccggctcaacagtggccgtgaaggtttcctcatccagctcaaggatatgattcatcaaagacacatccagcacaatcccgtgacctgacggtacagtggagccaacaagattcgtacctgcacctctcggtgtcaccggcaggttatttttccaggcataacgcataaccccgctgatttcctctgtggataccggaaaaacaaccgcttcggctgttccttttttacgtcccagattgtcagaaagatactgcggatcaatcgggcctgtaatgattctgttttcatcttttataattgataaaagtgcttccttcatggcttcttttactctcctattctctgtcgcagcgattcagttttctcacaacacgataaaacacactttgaagtttttactcattatcattatgttcaaggtgattataatgcaaaatccatcaacaatcgactttgctgatgggattttgcatctctaaatcattttctcattccttcagccacaagggtctaaagccaaactgaatcgttatatttatttttgtatttcgattatttctgtacttcccatgcaggaacaaagtagccgttgaattcatcctggaatatctgctttgttgtttctgactgaaataattctacaattctcttgtaaacgacatcgtctgcgtcactgctgcgaacagccatcaggcagaaatagctgtcgtcatcgtaatctttttcttcaaaaatagctgtgctcggatcaataccataatccaatgcatagttaccattggcaacggctgctgtcacatccggcaatacagatgggatatctgctgcgcccatttccttgatttcaatttttacattatatgtatcgatatccgcaaccgtcggattagcgcctgcttctgctttcagtgtgatcagccctgcggatgccagtactttcagtgcacggccgccgttggatgcatcatccggaatagcaataacgtcactatctttaatttcatctacagattttaccttgtcagagtaaagattcatggcaataataaatgtatctgcaattggtgtaatatcataaccgttcttttccacatcattgttgaaatatgcgtgatgctggaaagcattgatgtcgatttcaccggcatttaaagcttcgtttggcagggaataatcagaaaactgaacatattccaaatcaatgccctcttttgccagttcttctttgattggattccagatatcttcatagataacgccagttaatcccagtttaaccactcgtgtctcacctgaaattgctgtttcgcttcctgctgcctctgaacctgctgtttcggatgcttttgttgtctcagcagccgcatctgtgctgcctgttgtttcctttgctgtggtgtttccgcagcctgttaatgcgccaagtgccagtgcggctgttactgcaagtgcaataatacctttctttttcatgtcattttcctcctaatgcattgttgtaaaaaattaatgtgtattttttttcgctatataattgccgatgagctgtaccaccgtaacaatgataaccagcacaaccactgttgtataagtgatatccggcatgtttctctgatgaccatacataatggcaaagttgcccagaccgcctgcgccgatagctccggccatggctgtcagaccgatcagactgatgatcgtaatcgttgtaccgcgggcaatgcctgcaatactctctttcagatacactctgaaaataatatctttattgtccagtcccatggactgggcggcttcaatcaaacccggatccacatccgccaacgctgattcaatctgtcttgtaaaaaacggtgcgcatccaaataccagaggcacaattgcacctttgacaccgatggccgttcccatgatcagacggctaatgggtaccagacaagccagcaggataataaagggtacagatctgaaaaggttgaccaccttatcgataatctgataaaccagcggatgttccagaatatttcccggcttcgttaccgtaatcagaactcccagaaataaaccaaccacaaatgatatagctcctgaccagcccaccatgataaaggtttcctgaatgctcttgataaaaacatccggcctgtccatgacattcggcagccattgattaagcagttcgaccatccagaatcacctccactcctacattcttgtccttcaggtattgaattgcctgattgatattgtccgatgttccctgggcaataaccaccagaccgccgattggattttcaccaatcaattcgatacttccgaaaataatatttaaatccagatcaaattttcttgataactgtgaaacaagggcttccgacacatttcgctccagatatctgaaacgcaaaatagcctctcccggttttaactccaccacagggctcttggtctccaccaattcataaatccgggacatattggatgtgttctcaacgaactctcttgtaatctgctccttgggattggcaaaaatatcaaatactgttcctttctcaacaacacgaccatctttcataaccgctacccgatcacaaatgtctttaataacctgcatctcatgggtaatcaccacaatggtgatgcctagctctctgttgactttcttcaaaaggtcaagaatcgctcttgttgttctcggatccagcgcactggtggactcatcgctgagaataatctccggatcattagccagagctctggcaatagccacacgctgcttctgtccgccggataactgtgacggatacgctgaagccttctcatccagttctaccagtttcagcaaatcacggactttcttatccttttgttcctttgtcagattgctgccctttaacggaaatgatacattatcataaaccgttctggaagcaaagagattaaactgctggaaaatcataccgattttcttgcagtgctgtctcagttctgccggtgacatggcagtcagttcctcgtcaccgataaagacttttcctgaagtcggccgctccagcaaattaatacatcgaactaatgtggatttgccggcaccggagaaaccgatgatgccgaatatctcgcctttctcaatctcaagactcacatcattcactgctgcaaactcccgcccatcattatggaaaacgcgggaaacatgttcaaatctgatcaactgactcacttcttttctatactgaaattttattcgtttctaaagaactatgagaattcatattctcccattaccttagtgatttagtaggaattatatggtatatttttctaattgtcaatatgcatttataaattcccagtgtttcactatgcttttgtttattttatatacattatttcagattttgtcgaataattaagcactattccgataaatgtttggaaacatctggaaattgtattgctatttctactctaaacatgtataatattatatataatcattatgcattttgcacaataatacgtcatttctttattgtgataatgtgtcaaccgattatcttaaagggggtttttttatggaactgaaaaagctgatctacactgtcaacgaagatggtatcgctgtgatcacaatgaactacatgaagaatctgaacgccatcgatgagcagatggctgatgaactgatgtatgtagtggatgctgctgagaaggacccgaatgtaaaagttgttgtattaaaaggtacagaccgtgcattttccgccggcggtgatatcggttatttctatgaactgattcaggcaggcggcgaagtgaatatggatggcctgatcagcaaggtcggtgtggttgcagatggcctgaaacgcatgagcaagatggtcatcacttctgtttgcggtgcagcagccggtgccggtgtcagcctcgctctcggcggtgattttatgatttgtgctgacaatgccaaattcattctggcctttgtcaatatcggtcttgttcctgacacaggtgcaacttatcttctgacgaagagcctcggtaccgcccgcacaatggagctggctgctactggtcgcccagtcagtgcagaggaagcaaaagaactcggattggcttacaaggttgttgccaaagaagagttggatgaagcaaccatgaagtttgcaaggaaactggctgctggtcctcttctttcctataagaatattaagaaacagatttatgacgctgcttattccgattacaagcagtggcttgctgaaactgaaatcccgacacagcgcgaatgtgctgcatccatggatttccaggaaggctgcaaagcatttatggaaaaacgcaaagcccattttgaaggcaaataaaatttcaaaaacagtcttaaaaatgcaagcattttacacctgttttttgaaattttgcttggctctgaacagttacattttatttaagaaaggtggttgtcaaattgctgtctaaagttgtaagcaaagaagaagcccttaccaaaatccatgacggccagactattatgtttggtgactggcacggtgaatttgccgctgatgagattatcgacggtatgcttgagaaaggtatcaaagatatccatgctattgctgtttctgctggtatgccggatcagggtgtcggtaagctgatccgtgaaaaacgcgtgaaatcgcttgtaacaacacatattgctctcaatccacttgcccgcgatcagatgtttgcaggcgaactggatatcgagttctgcccacagggtacatggtccgaacgtatccgctgcggcggcgccggccttggcggctgcctgacacctaccggtgtcggcacagaagttgagaacggcaagcagaaactgacgatcaatggtaaggaatatctccttgagatgccacttcatgcagatgtttccctgatcaaggcaaccaaagcagatacagccggcaatctctatttccatctgaattccagagctaccaacagcacaatggctttcgccggtgattttgtcattgccgaagtagaagaaatcgtagaagtcggtgaactcggacctgaagagattcacgtacctgcacctattgttgatatggtctatgtgcgcacaggcgagaaacgcccactgtgtccaatgtggcagcgtgcaaaggctaaggcagaagccaaagcaaaagaaaaggcagaaggagggaataagtaatggcagaattaaccggacgcgcactcattgcatcccgctgcgcgaaattctttaaaaatggtgattttgtaaatcttggtatcggtgttcctctgatgtgtgtgaactatcttcctgaaggcgtagagctctggcttgaagccgagatcggaactgtcggaagtggtccttctccaagctgggacgacgttgacatcgactgtatcgatgccggtggtcaacctgcttccatcattcctgggggaagcgtttatgataacgaaacttcctttatgttcatccgcggcggtcacattgacgcagctgttcttggtacattgcaggtcgatcaggaaggcagcattgccaactggacgattcctggcaaacttgttcctggtatgggcggcgccatggatctctgtgccggtgtcaagaagattatcgttgcaactgatcactgcgagaagaacggtcagtccaagattcttaagaaatgtacactgcctctgacaggctatcagtgcgtcacagatatcgttactgaaagatgttattttgaagtcacaccggaaggtctcgttctccgcgaagttgcgccgggatatacagtcgaagatattctggcatgcacagatgctgacgtcatcgttcctgatgaagttggtgtgatgcaataaatttatagtcgtttaaaaaggtattgaccgacattcatacccccgctgcccaccggacagcgggggtattgtatttagaaaatgtcagccaatacctttttcaattcttcggcaaaaatctgatgtccctttgccgtcatatgtaccccgtcagcccccagttcgacaggccagacagatgcattaacaaaatgaagatgaagtttctctgcaatatccgcataataatccccaagctcccgacaagcctcatccaaaccggtggatgacggcgccatctcaccaagagccgtagacggcggcgcaattaaaagcacctgttccggtctgcagaccattggctgtacctgaagaaattctgtcaggaactgttccatccgcacggccaccctggcactgccggagcgaaccatggtcagcagatcattggttcccaacatcactgtcagcagatcaaaatcaccctcccggcgcagaatctccgtcaattcattcagttcccattgatccgacggaatctcccgtccgttctcccccagattcacaacgtcatataaaccagaattctgaagaatgccggtccatcggatatctgcgtgatgtcgtccgccgacaaaaccgcaggcaccataagtattggagtcaccgtaacatatgattttataagccatactgctgcctcctattcctttttgtcattataagtatcaaggaaatgatgaacctgtccgttctgcttataggcaataattgtgctgagattgacattttccacactcttgaaaatattgccctctacaaaagggttcactttcttcagttcactgattaactgcttaatctccatgcgcttggaggccgatgtgccatccggacgacaggaactgcaggtgtctgtaaagcggcaggcgcactggataaaatgcagaccgtttaaatcacgccactgcttaatatcctcctcacgaatcagatacatcggacgaatcagttccataccctcaaaattactgctgtgcaacttcggcatcatggtctgtacctgagcaccataaagcatccccatcaaaatggtctcaatgacatcgtcataatgatgccccaatgcaatcttattgcacccgagttcttttgccttattatatagatggccgcggcgcattcttgcacacagatagcatggagacttttggatatcatatactgcttcaaaaatctgggattcaaaaactgtaatcggcacacccataatccgggcattattctctattaactttcgattaacttcactgtatcccgggtccatcacaaggaacaccagctcaaatggaaatttgttgtggcgtttcaattcctggaataatttcgccatcagcatggaatccttgccgcctgaaatacagaccgcgatcttgtcccccggctgtatcagatcataggtattgattgccttggcaaacttgctgaacagtgctttgtgaaaacggcctttacggagactcttctcaatctcctcctgcttgtcatcaccgccaaaacttgccatcagccatgcactgtaaccgcccgacagactcacggcatcataatccagttcgcgcagtttcggcaccagcctcgcactgttcatgcctttcatgcaatataatatatatttcttatcctttgccaactttccggcttcagcctgctcaacaatatccggcatactgactgcgcccggaatggccccatagccaaaagaaatggcatccctgacatccaccagcagataagtccccactgccagatcagaaagccctttaatcgttatctctgctgcttcgctcattctttatctctccatatcattttcatttataccgttttgtatctattgtaccagtccccgggcataaaaaaaagccctttcttctgtaaatgaactgagacaatctccccccatcgtcagatgtatctatttgcttttttctcattaacttgctatgataagtaaagtatatttggaaggaaatagagaaatgaagaaatatataaaatacgctttttccaggacccttcccgtcctattcggctatatttttctcggtatcgctttcggtattgtgcttcagcaggccggttttaattttatatgggctttttgcatcagtctttttctttatgccggctccatgcagtttgtccttgtgccgctgctggcttcagccgcttcgcccctgaccgtcgccgtcacgacacttttcgtcaacagccgccatgttttttacggtctgtcgtttattgaatccttcaaaaaaatgaagacgcagctctacatgattttttctctgtcggatgaaacttattccgtcctctgcagctgcaaaaacgaagatccggaagaaaagaaccgaccagcctggtttctcatcaacctgtttgaccaaagctactggatcatcggttctgtcatcggcgctctgcttggtcaggtactgccctttgactttaccggtattgatttttccatgaccgcactatttgttgtcattctgttggaccaggtgctggcccatcctaaagccgccggccgctgcgccgttacagggcttctggcaggcattatctgtctgttcattttcggctcaggcaatttccttctgccggcactgatcatcaccgttttatttgtcacagcctttgcacaggccgaaagaagaaaggagctgccgtaatgaatacaggacattccattttgctgatcgccatcgcatccggtatcacctttctgatccgcgcatttccgtttctggtatttaaaaaacggcagatgccggctttccttaaagaaatcgccgacaaactgccgcctgctattattgctgttctggttatctactgcctgaaggggccactgactgtcctcggcaccgaaaccattgccgccatcatcgccattgcaggtgttgtcatcctccatctctggaaacgcaatacgctgttaagcgtggccgccggaactgttctgtatatgatttttattcgatgccttccataatgcgtcttgccacaaatacgccgctggctgatgcatgggacagtgagtgtgtcacaccgctgccatcgccaatgatatacagccctttatgccgggtctcaagattctcatcaatagaaacttccatgttgtagaatttaacttccacgccataaagcagcgtatctgcattagctgtacccggagcgatcttgtccagtgcatagatcatctcaatgataccatcaaggattcgcttcggaaggacaaggctcaaatctcccggtgtagccgacaatgtcggtaccacaagactctctctgatacgtttttctgtacttcttcttccccgaatcaaatcaccaaaacgctgtacgatcacaccgccgcccaacatattggagaggcgggcaatactttcaccgtaaccgttgctgtctttaaatggctctgagaaatgtttggccacaagaagcgcaaaattcgtattctctgtttgaagttccggattttcatagctgtgaccattcactgtgacaataccgttggtattttccgctacaactgcgcccttcgggttcatacagaaggtacgtaccaggtcttcgaatttctctgttctgtatacaatcttactctcatagagttcatccgtcaaatccgaaaatacaacggcaggcaattcaacacggacaccaatatccacacgattggatttcgttggaatatccatctcctgacaaacggtctccatccacttactgccgcttcgtccaacggaaataatgcactgtttgcaaaaatagctctcatgcgaagtatgaacgccatagccctcgccttcttttgtcacatgctccacagcacagttgaaaaagaaatccactctgtctttcagctccgcaaaaagctgctccaacacaatataattcacatccgtgccaaggtgtctgaccgaagcatccagcagatgcaggttattctggatgcaaatcttcttaaactttgtatcgccggttgagtacatccgggtgccttcgccgccatggctcatattgatatcatctacatacctcatcagttccatggctttcttcttgccaatgtattcatgcagtgttccgccgaattcattggtaatgttgtatttaccatcggaaaatgcaccggctccgccaaaaccgctcataatggcacaggaaggacatcctacacagttcttgacagtatccccattaatcggacattttctcttctcaagttctctgcccttctcaaaaacggcaatcttcaattccggtttcttcatggccatttcccaggctgaataaataccgccaggacctgcgccgataataatcacatcatattgtttcattcttataaatcccctcttcccatgacgcattcaaccattcaattacctgcgcttttccctcttcactaaaaggaaaaagctgtgttgtcttaagggcatcctgtgtcttttcataagcaaagggctctggccagattactgccaaaagcccttcctccttcaggatattgccctcttcgtcttttgcttctttttgtttgatgatacggtatcgcattccctgataacttcccgtaaaagggttgccatagttataaaaattcagggataaaatatcatcagatgtaatcatctgcccaccatccttttgattctctgacaaagtatctcacttccaaaatgtatagcatttcggaagtgagttttgaacagttatttaacaaggctccaacgctgtccttcagtcagattataattccagatccggatattcgttccgctggccacggtgccgttcgtcaggtctattgcagctgttcctgaacattccggcacgatataatagcttccctttccatccgggatcacctgccaccttgttcctccggaggcctgttccacgttgcttcctgaggcagatttctgccctgtcactcccagataaaaacaatcccgaaaattcctaaaaagaatttttaagaacacaaaccaaagtaaaacgggaagagataacagctagctgtgaatcttaaccaaaatcaaacatgagagtttgatcctggctcaggatgaacgctggcggcgtgcttaacacatgcaagtcgaacggacgatgaagagcttgctcttcagagttagtggcggacgggtgagtaacgcgtgggtaacctgcctcatacagggggatagcagctggaaacggctgataaaaccgcataagcgcacagcatcgcatgatgcagtgtgaaaaactccggtggtatgagatggacccgcgtctgattagctggttggtgaggtaacggcccaccaaggcgacgatcagtagccggcctgagagggtgaccggccacattgggactgagacacggcccaaactcctacgggaggcagcagtggggaatattgcacaatgggggaaaccctgatgcagcgacgccgcgtgaaggaagaagtatctcggtatgtaaacttctatcagcagggaagataatgacggtacctgactaagaagccccggctaactacgtgccagcagccgcggtaatacgtagggggcaagcgttatccggatttactgggtgtaaagggagcgtaggcggcggagcaagtcagaagtgaaagcccggggctcaaccccgggacggcttttgaaactgccctgcttgatttcaggagaggtaagcggaattcctagtgtagcggtgaaatgcgtagatattaggaggaacaccagtggcgaaggcggcttactggactgacaatgacgctgaggctcgaaagcgtggggagcaaacaggattagataccctggtagtccacgccgtaaacgatgaatactaggtgtcgggggccataaggctttcggtgccgcagcaaacgcaataagtattccacctggggagtacgttcgcaagaatgaaactcaaaggaattgacggggacccgcacaagcggtggagcatgtggtttaattcgaagcaacgcgaagaaccttaccaggccttgacatcccggtgaccgtcccgtaatggggacctctcttcggagcaccggtgacaggtggtgcatggttgtcgtcagctcgtgtcgtgagatgttgggttaagtcccgcaacgagcgcaacccctatgttcagtagccagcaggtaaagctgggcactctggacagactgccggggataacccggaggaaggcggggatgacgtcaaatcatcatgccccttacggcctgggctacacacgtgctacaatggcgtaaacaaagggaagcgagagggtgacctggagcgaatcccaaaaataacgtcccagttcggactgtagtctgcaacccgactacacgaagctggaatcgctagtaatcgcgaatcagcatgtcgcggtgaatacgttcccgggtcttgtacacaccgcccgtcacaccatgggagttggaaatgcccgaagtcagtgacctaaccgcaagggaggagctgccgaaggtggagccgatgactggggtgaagtcgtaacaaggtagccgtatcggaaggtgcggctggatcacctcctttctaaggaaaaatacggatccatttcaacttcggtagttttatccgatgatcttctacctgaatatttccattgaccacatttgtcgtatagctttttcggctcctgtgttttgatttgaattttggaaagccaatctttggattcctgaaaaaattcttatatgccttttccagatgcatctgcacatttgcaagtgccatcagttgtcaaagtacaggtttaatttttcattttaggtcttttatatctatattttataacatcaggtggggtataaaaataccagcaattttgttcaacataaaataaggcacttaaaaagttattcttctctcaactttttaagtgccttaaaattctatatttatttaccgctgactaagtcatctcgaaactgccttatttttgtcggatttcgtatttttcttccagataaatcggattgtaggagagcttcgactttctgagcccctccagaccgatatcatcttctctgttcaccagcagggcatctggaaattcatgcagcaaaaattgctgacaaatgaacggatacagacctctgatttccggattggccttctccacatggatcacagccatccgttctgcttttccatatacaccaaggctaaatgcttcgagctttccgtcgatataaatgccgcccattttatagtccagatagcggcagttcgtgagcagataatcaatgccattcagctcataatcaatccgatgatacgcatcttctatattccgctccgtttcccacttttttaaaaacgtcataatttcatcatgatacttgctatcccgttccaaactgcggtattcataacgtccgtcatagtttttcataaaagcattcacatgatttttcttcttatgataggctttcccactaaaagacattaattttcgggcatcatagacataatcaaaataccttctgtcagccttcacatcataacgcgtcgtatccaactgcaaaagatcgactgcttccttgtccgccagatacagaatcatttttgtaccaagacattcattgaaatatgcctgggccacttcaaaataatgtttcagatcctccggtgcacataaaggtaccatcgttccgggctgcccatctacatccatgatccagattaggccatgcgcatccctgatatagcgagtgttataataatccttccacataaaattgctgacaagaatattttcacaggtgtgggagtaccgcattttaaagtacggcaataatgtctggtaatcctccgggcagagttcctcactgacaaatgtatcaaaattcatcttattcctgaggttttacgaatgatgtatatgtattctcatcatccagtgtatggtacggttccggccatggcactgtgttctgcggctttccaagaacagagtaaggcaaatgcagcggccccggatctgtcacaggcggtgcttccccaagtgtgaccggtggtgcctctttttcctccggcgcggtgattctggcatattcttctgccgcccagttcagacagtccatacgtgagagaatatccgggcatacctgttcatgaaggtatttccattttccatcttcgcatacaaaatcagagccataacgttcccagagaacattgcaatatttctttttatctggcgtcagtgttgaatggatgacacccggtgtgataaaggagcctctggcgctcatgccatcctctgccacttctataatatccgtgacaagtgtatgcaccgatgcttccatcaaaggacgcggatcctttccggccgtttccggataaatttccatcagttctatggcattttcaaaggacatcttgtcgtactgtgcaacagagccgtgccagatttgatcaaaacctctcatgcggccaaaaatatgtgcccaggagcagttcggatctcttgaccagatatctgcccattcccctgtcgcatccgcgcgtccgtgaagataggtgtgtcttgcttttaccttctcgacttcctgactggcattggcatttcgaatccgctcatgcagacttaattgtgatttcatcggaaattcctcccctcttttgaatccaatccgtaaagtgctggtttgacatagccttccggtccgtaactcactgcatctgagaatgtctcgtaagcttccggcatcggcggatagttatcccaccagttgaaatctgtattgtggatcagctttgcaatcgtcggtgtgccaaactccacatcaacaggattcgtctcatagttatgatatacttcctgttcagaataatcttcacccgcttcgctgaccagatcagtagaaacaacgatatgccagattttccagccatccttttccttcacaaaatcaaccgcaattttttcaggcatccacaatgctctgcctgtgccatccggctgcgcttctgtttcctgcgcaatagaataccaaagaccctttgctgtctttccgtctccagccagttccacaagtcctgtcgaaaccggatgattcgacagacagccgatatgaagattctgtggtatatctgcgattgcagggtttgctgcatgcagcttcttcagctgtttttctcgctccttttgatgatgcaccacataataatcatgaatggcatccatccctgtgtagtagcctgtatttcgtccaaaggaagctgtcttcttgtgctctggattctgcacccacagatcattcaattcttcttttcgcatttcattcgcaatgtaaatcacgcgtttatggatgagctttttgatttcttccacatcccatacacgctgaattaattcttcgtctgtatattgtcttgaattcgccatttctctcgcctcctctgtttatcagataccataagaaaatgtttctgcaaatgtccggtacggaaccggaatttccggtgcttttgtcagtgctctgtccggtgcgtagagcggacggattgttttctttacagaatactcaggatatttgaagtctgcaagttcctgaaattccggaagcggtggataaggcttttcttctttaccccagctctgtccacagatacagtcaatatcattgacgtacatcagattaaaaatcttccattcatcatcctcataggtgaaatcaaccgcaaagtaaccccatgtccaccttgcgacagggccacagccctccactttattgtaggcaccctgacaataccagaggcctttggctgtctgatggtcttcggcgatctcaataatcgggcatgacatcggttttaccttgaagggtccaatgccgtataattcttcgtctgataagctgccaagcttttccggaaaacgtttctgtaaaagatgggctaccaggtcatttcttctgtattcagcctcataataggccttgattgcttcctcacctttataagccccatcattaaagcttaaacagagatcctctctcttcttactccagaaacgctcaaacatttcatgttctttatttaaaatcatgcaatttgcatatttgcccatcaggtttttcatatatcgctgatcttcccaacgggataccagctcttctgttgaatatgtctttcccattgattgttcttccttttctcaaagttgaattttaattcatttaaaataatccaaaatcgacaactgcgtcatacgcatcacggacagcccgcataatcttgcctgcctgattgcaatctccgatcacatatgtctgcggaataatggtccgaagctgattgacctgctcgctgtctgctttcatacctgctgcaagcacaactgtgtcagctgtaattgtttcttcttttccgcctctgtccactttcacacctgtatctgtgatttctgtgcagcgggcacctgtcagtatctgaattcggtcacagctgtttaactgatgcatcagattttcacggtgtgtgaccacacagtctgtcgctaactcttcctgcatttccaaaatcacgacctgatgaccgtctctggcgatatgcagggcctgctcgcatccgacaagaccgccaccgatgacaacgacctgatttccaagcacagattcttccgtgaggtcagcaccaatcagaacattgctgttgtggatacccggcaccggcaaaataagcggtttggcacctaatgcaagaattaacgcatccggcgcttcctcgcgaatgattgcttcatccacccggacacctgtatggacgatgacatcgctcttttcaacctgtgcgatcagaaattcccgataccgtttcatggatgctttgaagtcgacaccatccgcaaatttaagtgcgccgccaagtcgttctcttgcctcgtataaaaccgcctgatggccgcgctctacggctgtcaatgccgcctgcataccggccggtccgccgcccacaatcataatttttccggtatgatgcaccggaacagggtggaacacttctttttctcttccgatcagtggattgactgtacagcgcatacaatgatgtgccatcattcctccctgacattccccgcatcgcaggcatggacggatatcttctgtctgatggcgcatcaccttctttggcagaaacggatcggcaatcagtgaccgtccgagggcaatggcatccgcgcctcctttttcaaggaaagcttccatgaaatccgggtctgtaaatgcgccgactgacacaaccggtgtcttcacatgtttgcggatttcagcagccagattagcattttcaccttccttctggaaaatgcccggatgcatcaaaacgaaggaataccagtctgtatttgtgcctgctgacacatggatcaggtcaaccttaccatctaacattttggcgatttcgatgccggtctcaatgccatagccgccctctacacgctctgaaccactgattcggatctcgattgggaaatttctgcctactgcctgtcggactttttttacaacaagcagtgggaaccgcattctgttctcaagactgccgccccactggtccgttcgccggttggtcagcgttgatataaactgatgcagcagccacccatgaccgcaatggatcatgaccatatcaaatccgcattttttcaacattgccgccgcgcgtccaaaggcttctgcgacttcataaatctgcgcttccgtcatttcatcgaccgcaacgccccactcctcttcactgagtgccgacggtccgatcggatgtctgccatctaaaaaagccggatcacagagtgcaccgccatgatccagctcaacggatgccgccgctccgcctgcatgaatagcctcagccatttttttcagtgatgagataacagaaggatcatccatccccagctgctggggatgggatcggcctgttgcattgtcgacaatcacatcaccgactgttaccagggcagcgccacctgctgcccggagtcggtaatagtcaaagttttcatctgtataatgttcctccggccctaactccgccatagaagtcggcgccgataaaagtctgttttttaatgtcagccctgccactgtcagaggcttcatcaaataatcatatctaggcaatcaagccgcctccttttttaatagaagataatcgcgatgaccacacctaccagtgagaaaataaccgggaataataccgtcagcacgaaactgtatttgtaagattccttgaagtctgttttgaatacacccataccctgtgccagcatcggtgaatgtggcagtgagtcgaaggttgtagacgatgcaacaagaattctgtgcagtgcacccggatcaacacccggcattgctgcaaactgtgcaccaaatgttccaagccacattgtcataccggaaataccatcagcacaaagagctgcgatcagacatacagataaccatgctgtcagatacggattcacattgatggacatgattttctgaatcagataatccatacaagctgctttctgagcaactaaaccgaaaccgaatacacagcctgacatcataatgaatggaaacatttctgttgttccctgagaaagtgctcttggaatcgtaattttgtgaacaacaacatcaaaatgaagaatagctgtcacaccggctgtgatccacataccgaaaatcagcgcattaactgcagcgatatgcatcgcaagctggaagaaacttgtcagtgcgataacaagaatgatcggcacaatcgctttccagaatggaggtgttggaatatcgccaaattccttgcttgcgccatattctttggatgcatctgttgtgtaaccaattccttttctacgggcctgtttgatcaggtatctcagatagaatacggccatcagaataccaagtacagagatggcaatggataagcccggtgctgcccatgttgtcgttccaaggaaagaagttggcagaacgtttggcatcgctgtaacacccggaagggtaaaggatacgatcggcggtacagctactactgctgcataacctatgtaaataggaagatttgctgctttcatcagaccgaaggccatcgctgcgacaatgaaaatgtatgtctggatgccggccagctgcaggatagctgcaacgattgccaggataaacggtgcattatcgccaccaacatattttataaatgtctgtccgatggcttcaccacatttggtttcacgcatcagataggagaaaatacctgctgacataaaagccagtgcaaactggctggcaaacgtaccaacgccggttacccaagtcgttgtcatcgttgtcatccatccgtctgtcgtaccgaatgccataatcgctgaagcaatcagcgctgctgttgcagtgtgcacacctttgtaacacatcacaacgaataatacaattgaaactactaagatcgcggtcgaaaccggtatacttgttaacatatccttctctccttattctttttctttacgtatttttaaacccctgtataatgatcatacggaacaggcagcgtcggctcatcatatggatattccgcatccggtccgtattcccacatcggtgcatcaagtggctgacacattggatcctcaagctgtatctgccccagcatcttttctggtgccggctgaccccagcttctatcatatggactcaaaaacagcggatataaaatcatgtgccagaatttccatgtaccgtcttccttaatgaattcgacttcatattttccccagcaccatgcgcccttttccttgccaggctgcggtgcagtttctgtccccggtgacaaccagacaccttttgccgtttttccatctgctgcgacttcgataatctctgtattcattaaatgaatcatcatcaatccgcgaagttcatcaatgtcatcaggattattacgatcaccgtgaagatcaacataacaatgtctgaccgcttcccatccaacaaattttccaaaaggcatgaccaatttgtcatcttctctttttgcccacaattctgcatattctttatttcggaatgcggaatgcagataagaatatctgcccatcagatttctgatttcctgcaaagcttccagacgttcagcctgatgtaaaagtgcttcataatcgttcattttctcctcctttcctgctgctattcatcgctgcatttatcataagttttatatggttcaggaattgcaggctcattggctggatacaattcatttctgtcataatgccagtctgtcttttcaggtttcgcattcgggaattcaaaagcattcgatacaaattctgtattgtcggcccatccttctccgaattctgattgaaacagtggataaatggtcatatgccagatcttccactcgccatcttccataatgaaatccacactatacttttcccatacccattttgcatgaaccttctcgttctctgtgcgatccacgtatgtatcatttccctgggaaaggaaggctgctttggctgtctgcagatcctctgctacctcgatcacttccgtatcgatttcatgtatgatcactgcacctttaatcgcttcaaataccctggtgtcagaacgatccccgatatcctccagataacaggcttttatgccatcatggccatcataagacccccatggtgtcatcagctgagcatcttctctttttgcccacaattcaaccgtctctttattacgaaatgcggtcccataatagctgtatcttcccatcaggtttctgcaggcctcctgtgcttcaagcttcagaagcttgtgctccagctgttctcttatcttctcttctgtcattttcacacctcgctatacaaatgatttccacagttttggtactgcatcttcatagtggtcatatggagcaggcggctccggctgatctgccggataaacgatttctttattccatgcccaatttgattccggaagtgctttatgattgtggaatggaaaatccacttcatccatgtccggatgctgtgtccacggcacataaaaatcatttttataaatcggccacagtcttaacctccagaatttccattcgccgtcttctttgataaaatctacatagtatttgctccatgcccattcgcatgatgacatgatctcgagattttccggaagcgggtcgccttttttccaatcagggaacttgctgaaatccggaatataacagctctcatggcccggtgaaagccatacgcccttggctgttttgccgtctttcgcaacttcgacaactgccgtatccatggcatgcatcatcatgccgcctttaaagatcggactgtcctgtacctgaggatcacttctgtctccatgatcttccagatagcattttcttacaccttcaattccaagataatatccccatggcatcgccaggatgtcatcctctctgtttgcccagagattcataaaatcaatgtttcgcattgccgtatgcagataggagtattttcccatcaggtttctgcaggcctgtgctgcttcaattctttcaaagcctgctttcagctcttcatatgttcggctcacttcattgacctcctttcgcttttcgctttcatgggcttattataacttgcgtttcgtcagaatgtaaaacatcattccggatactattccacaactaattgttgttgattgttaatatattcaccaataaagtgatcaattgactgctcaatctcatctgaatgcttcgcatataacagaccatgcgtgccatcctcaatgccaagaatctgacaatcggcgcctgatgccttctgtatcgatactgcattttctggatcaacaaccgtatcctttgaaccacacaggataagcaacggtgtgtctgattcctgcactgcatccgataaatccacatctttcaagtgaaatccgtattctttatagctgtaccagtctccaatccacaagaaaagcggaatggatgagaactgatttttcatcatatattctgcggcatcatacagatttaccacaggactctctgcaactgtaaaggcaacctgctccggataatcggcagacgccatcagtgctgcagccgctccaagtgtatcgccatgcacgataatccggctgtcctcgccatatttttcacaaataagctgaagccactgattgacatcctttccctcgtataccccataactcgcacagtttccttcactttccccatgggctctgttatccggcatcagaatgttataccccttctcccagtaccatggcgcatagtaaaagtcttctcctgcagcactgccaatattgtgcagatagaccaccgtctctttgccaccctgatcatataacagcccgcttaaccggatattatcttccgtctgcagcgtaaccctttctccctggtgctgttctttccaggcatcatagtcattctgacaggccagcagttcccgctttgccacatcggtgttggagcctcccttcatggttgccaacatttcctcaatcccagtataattgccaataaacgcattcacataggcttttgaaaatctgacaaagcaaatacccacaagaaaaatggcaaaaacacccactatcagcgccatgtttccaatctgtctcagattccactctttttttacttttcttcccttcatatatcacacctcttttttctttagtatatatacaccgacagctgtttgtacaacaacgattcagcttgtttttgactctaaaatgtagtatactatcaacaatggcatctgccaagtttcaagtcgagcggtcgcgagacttggcgcgtgattctggtcagcgtaagctgacatattctttacagaatcactgcgcatcctcgcggagcgtttatctcagtcggagattggactcccactgagacaaatttgctgttactcaccacctgaaagagggggggggagtcttctcgactgagataaacttgatttataaaaattgtataaatgaggtgaatcttttgattaacgatctgatgatcaaatctttcctggcactgacggatacactgaactttacgaatgccgccaagcggctttatctgagtcagcaggctgtcagcaagcacatcgccaagctggaggatgagcttgaatgtcagctttttttccgttcaaggggcgatatctccctgacaccggctggaaagatttattttaatgtgttttcacaatatattgataatatggcaaacgcaacaattcttgtccgcaatatgaccggtactgtcaagcacaagctcattatcggccatcttgagatgctcgatatccgactaacgctttcatctgttgtccaaaagttaaagcagcgttatccggatattgaactggaataccgatcctacagagactacgaactgccccaggcgcttcatgacaaccgcattgatctggcaatcacgctcggaccggagattcagcctgatctcattataaggacagtacctttgacaaagattcaggactttttgttctgtggcaaggatcatcctctggccaagacagccacctcataccttgattttaaagatgagaatgtgtttttgcagcttccgccttccggcgatatcaaccagccgcttcagcgtctaaagaattatgatttcccagtgcagaatctgcgctgtatcgatacactttcttccactctcactgccattgaaatgctggacggtgtttcattcgcagtcgccaacagtattttcatttccaactatgtgacatttccaagtaatgttcttgtggatctggtggccgcttacaatgtgaagaatccgcatcctgaactggacgatctgctggaattaatccagcaataccatcaggaatcgcctgttctttaaccgctactacaatttgttgttgttttcagcgccaatatgttgttttacatgcatatcctcctcttgctatactgattgtatcaacaatcaaccctatagcaggaggatatttttatgcgaaaaaaagaagtctctgacgtatggatgttggaaaaaacaacaaccctcgatcaactcatcatacatgaaggcgcacagattcatacacctgacggaaagtttgtggccatgaccattaacggcagtggaacaccgatcacccccggcacatattatggagatattgttctgacagtcgcagacacatgccatatgccgccgcacggtctcatgaaaatgatgaaccgttctgaagaattcagatgtgcacttgtcatcaacaacaatgagattgttaaagaacaatccgtgaatgaacttatcaaaggcggccttgtcaccgatcgctttgccgacagtgtgacgatacaaagcagcgaaccatcatttaatggcattcttatcaaaggaaacagccgttatcagatcaaaaatgcccaccttcatctggaaggcaatggcaccaacgattttctcggtgtcggtgccggtattgctgctatcgacaatacccatgtccgcatcgacaactgtgacatcacgatggccggcgtcacacgatgtgcgatccattccggcggagacagcatcattgaaatcaatgactgccagattacaaatgaaagcccggatgcccctaaatggatgggcgatttcagctggggaatcggtgtgaccggcagcaaccgccttgttcagctcgctgacaatggaaccgtttattataatcgctgcaaaatgaaaacaaatggctggggtgttttctccatcgacggctgtgatgtctgtgctcgcatctatgtcaaagactgtgatgtggatctgtccggtccaagagcgaacggctacggtgctttctgtatcggtgaccgcaatatcgtccgttttgaccagagccgtgtgcatgttgacggttacgccttattggtgcgcggcatgatggcaaccgccagagctgagattatcaacggctgtcagattaccggcaatcgtttcgctgttttatgtatcggagataaccagacgcctgttaccctgcacgattcctctttcataaccgatcagtctacccttgttgtaaaaggctcagcgacctgttttgacatcagaaactgccggatggaaccgggcaacggtgtgattctgcagctgatggataatgacgaggctggtatggatatcggcaaagtcaaagtgccggaccgcgaagatgtttacttagaaggtcgtgacctgacaaagatcgatcctgaaaatgatgtcattttgaatttatcagatatggacattgtcggggatttttataattccacaacgaatcttcacatggaaaaggaagctgaaaaaggcggcgttggcaatccggatacgttcggcggtctctttgcaccaccggaaggtgtcgaaggcagttttatggatgccgaagttccggaaggtgtcgatgatccaaagaaagaactggagtatgataaggaacttcgaggtccgaaaaatcttgcagtgaacctgaaaaacacccgtctggaaggtgctgtaagcgccgcttcccagtcctaccgcgaaggtctgacatggattgacgaaaaggcgcggcttgagctgagccgtattcagcagcaaccggcaccgactatcaacaatggtgtcgttgtcacacttgacaccgactctacatggattgtcacaaagacctgctatctcaccggattacatatcggaaaatactcaatgatcaaagcgccggaaggacagacactgacactgtttgtcgacggcacagagacaaagatcaaccagagtactgactataccggtaaaatcgttttaaaagtacaataatcaccctgtcaatcagctttttaacaaggagaaaaaatatgaatcaatactatcctcatttatttgaaccttttaccataaagaaaacaacttttcgcaatcatatcttttccgctccaaatatgatgtgtcatatggatgccaatggtttcccgacagattatatgatcgcttactatgcagaaaaagctaaaggcggcgctgccgttgtcacagttggcgacacacctgtggatcatgagcatgcgccatcgaatccacgcagcttcaacctgtcttacgaagcgctcccattcatttccgagcttgccatggcaatcaaatcccatggtgcccttgcctccctcgagttaaatcatggcggcctctacaatcctccggaagcgatgggcggaaggaatccaatcggacctgtttcatttgtgcgcagctgggacggtgtggaagtgatcggtatggatgaggcaatgatgaacaccgttgccgaccattttgcagatgccgcagagctcctgaaaattgccggctttgatatgtgtctgctgcacggcggtcacggctggcttctggatcagttcatctctccgcttttcaacacaagaacagatgaatacggcggcccccttgaaaatcgtgccaaattcccgttgatggtcattgaccgcgtcagagaaagagtcggcgatgattttctgattgaatatcgcatgagcggttcagaggaaatcgaaggcggcctcacagccgaggaagccattgaatttgcaaaaatgatcgacggtaaagtggatattatccacgtatctgcagcccttgacacagaagaagcccaagctgttcacacacacccgaccatctttctgccacacggcgtcaatgtccattatgccgcagaaatcaaaaagcatgtgaaatcaccggttgtcaccatcggttctatctccgatcctgagatggctgaacagattctggccgaaggacgtgcagatattatcggcatgacccgtgcgctgattgcggatccttactggcctgaaaaagcaagacttggacagagcgcagatatcaatccttgtctgagatgcctcgattgtctgaccggcatgcataccggacagcatttccagtgcgccgtcaatccatggaccggacgtgaattccgtatgcgcaactatgtacagcctgccaaagagcagaaaaatgttctcatcatcggcggcggccctggcggtatgaaggcagccatcactgctgcttcccgcggccacaaagtcactttagccgagaagaccgatacactcggcggcctgttaaaattcacagactatgattccttaaaagttgatctgatgcgctacaaaaatcatctgatccacatgacgcagtccatgccgattgatattgaatacaatacagaagtgacaagcgaatacgttgcaaataaacagcctgacgcaatcattattgccacaggctccacaccgatcacccctcgtattccgggtattgatctgccttctgttaaacacgcaacaacggtctacacggatctcagcatcgtcggcgacagtgtcgttgtcatcggcggcggcctcgtcggctgtgaaaccggcctgttccttgctgagctcggaaaggctgtcaccatcgtcgagatgcaggacgaaattgcgcctgaagcgaactggatgcacaaagaaggcatgatgcaggcattcgccaaacagaatatcacaactgttaccggccgaaaggttgtttccatctccgaggatggtgtaactgtcgcagacaaaaataacgagacaactgtcatcgcatccgattccgttgtttacgctatcggtatgcgtccgaacaatcatctcgttgatgaactgcgtgactctgcaccatttgtacgtgctgtcggtgactgtgtccgcgcaagaaaagtatcacctgccatctatgaagcctattatgcggctgtagatctggcttaatcctctatttgttttgaaaacaggcagctgaacctctcctcagctgcctgttttgactttcaccggccttaagaagccagtgcactgattgcttctgacgcttctggatctgaagtctgtgccgcttcgactgaaagctgaaactctttctgatccggattgtcaaacatctgatcatccagaagtacctgcagtctcgatcggatatatcgacaaccgagtttactttcaaccgctttgtgtgccagatattttctggttacggcatctaccttcatgtgaataccgtacattttctccaactgcctgatcggagacatcttcttccggcttgtcatcatgtattcaaaatcctcttctgagagcatgtcgacctctgcaatctgctggatacgtcctgcgatctctctgcggacattgccatactgcaccaggtcttcctccgtaaaaagtaccggttcgctctgaatctccgcctctccccgtgaaaaaccaataggcgacggctttatagcacggttctgcagaagtgtttcaaaactgccgcagaaaacgaaagaaacaccgctgcagtcgatggtcactgattttttcttcggatcatcgctgcctacaatcatcgaatcgccatccatgatcttcagaaattcgttctggatcatttttgagaaatctgtgccgcctgatgccaccgccggctcaaagagcttgtctgcttcatcaatgacaaccagtaaatggccgggatttctgccattttgcagttcttccagaaaaatatccttgatgtgatagctgcctttccagccatcacaggccagctgcggaccgttgacaatcttgataaaatcgaatttcttactgagggaacgccagatttctgttttgccacagcctgtgggaccggccagaatcatgttgcggcggcggccctggaggtgattgtacaccaaaatagcagcagcctgtctggccccatattggccatgaacatattcaccgatgtaatcatagatgagacgcggtgtccatctaaactcttcctcgtcaaaaggtgtttcttcgtaagccgtctcaaaatccaaatcttcgcaatctgcattttccttggactgcttcatctgaaccggatccatgtcaaacgccatctctccgtcctcattcaccgatgcattcagacttttataggttatacgctcagaagcgtccataagggttgaaagaatctctttctgttcattataagataacggtgtccgggacagtgcctccgcaaaaacctgtccggcacttcttttgctcctgccattccagaatgcggagatttcttccgcctgctggtatttcacatgatattcatcatccgtcagcgcatcataagttccgatgcgtgcctccttgataaactctttgaaaggattgcccatgcaggtatctgcaccttcgtgcatgatcaatccaaaataagtggtccaaaattcttctgctgtctttctgtccatacaaactcctccttcgtgtactttctttttttcttcaacttatggctctattatacccatatgccgaaatacgattgtaatcgctgtggtacaccaaaggatacgccgttatttaattgtaaacttcagggctctgccacgccttgtactgccgttttctttcccatcacaagtctgttcttcaggcagcgccatctccaaaatattctttgcactctttgatttccagaatgatggctgtggcattgtccgcagcccccatccgatgtacggctgccatcaatgcttccatcgcttcatccaccggcagacacataatttcttccagttctttatcccatatcataccgctgacaccgtctgtgcaaagcagatatttgtctcccggacaataatcccactgataaatatccgctctcaccggttcatcttcctgttctgttccgagaaatccgatcagcattggacgcagatggcccgggtaataaaaaacatggtctttcgtcagctgagtcagacggccatctctcatgcgatagattcttgaatccccgctgttcacaccgtaaatggcataccggccgaatttcatggccgccatcgttgtcccgatctgattaactttatgcgacttgcgccaactgagcatatcgctgttcaattggcagaccgtcttccgaagctgttcttcatattccgcttcattctctgatgtccagtcatcctttgcctctgccaacgaactggctgcgatcaaagaagcgacttccccatccggcagaccaccgataccgtcaaaaacccccagccattgtccttctgtctttatcccggactgcaaagcgctctcctctgctgtctccggatattccaattgccgaatttctccggactccgatgaatagacaaggaagcctgtatcctcctgctctaacggtctgaaccgcgaaaaaaagcaataattatcttcgttatttttacgtacttcacctgttatgctactgcacactgctctcagattcttcatatgacttctcccatatcgctgcaaatgtatccaacggatcatctgaaacgatacacatgagaataaaagcttcatatggattaacaggataaagagacatcataccggcctctgccagcagatcattggtttgctctacaaattcgttaaaacgttccccggcatacatgcctaatttatcctcatttaatgcatacaaaaggaaaatcagggtaatcaggtcaaaacgttccatggatttgccggcaagcagttcactcattctcgctctgttcagacgtttgctcttaaactgtttcttcaatgccgtgaaagacctgagattgcctttttctgtgaccggtacaccgctgtagagaacgctttctatcctggccgggttaatgttttcccatcttgtcacctggccaaacttgtcagggtaccggttcatgtaatcagcacaagcccgctgtacacgccggtaaatcttttcaaacatctctctggatttcgttgtttttcggtctgcgatcattaaaaacttcagataatgcagataaacccagagctgatcttccattcccaaatacatcttcggcattgtctgaaatgcctgccatctgtgatcggctctgaccggttccttctgttccagctgttcataggtctctaacatattcattgctgcctgataagactttcctgtatgtcggcaatgccagaaaatgacttccttcggatcattaaaatcaaaatctgattctttcagcactaaagtcagaaatttcgtcagcattttatcatccatatccagaccgaaaccaatcaaaaaaagattctcccgcttgattgtctccgcattcagccatcgattgatctgccgctttaattccgactttgacttacctgccatacagtcatttttctcgaaggctgccagcatgaaggcactgtaatccattttagaatagggtttccttgttcctgatgcttcatatatatatcgtttcagctgctccttaaacgacaccagctccatcacctttgttaaatacgcataaatggtatctccgccggccgctgtaaactggtctgattcgattgtatcataaaactctttaatggctgtaatcgtgaagttataggctttcgctgatgcctcatcatcaaaatccaatatattatttatctgcatgtatattttctcctcttattatgcatctccgtcagatattcgctgtttattctttctgaccgatatccgtattccggtttctaaccctgtctgctctcattcagatgattcagaaacttgtcaataccactgtgaaaatcacaggctcccggcttattcttgcggaatccgctgcatccaaggaaattgccatagggaccattttttttcagcagcttctttccgcattcagggcaatatccataaggggccttgctgaccttttcaagtgcttgacgcagctgagctgccgactgataacgttcttccggatcatacgcgcaggccttggcaatcacaaaacgcatgccttcaaaggcgcggcacggctccggcagcctggctgttccaaagacccttttctgcatccgttcatctgcatcaataatatctgaaaaaggaagatgccgatcattggacagatagtaaagcaccattcccagggaatagatatccgctctctttattgatgtgtgataaagaagcaatagaagtgtaaaaaattttgccgttcctatccggcacttgcgcattgtgtcggataggtcgggcggttattcgggcaagtccaccttgccaacaaaagaataataaatctcaatgtcctgtctgcgggtcttgttctcgtcatagctgcactcatgcacaacaattttctctacaaactcccgcagcagagtaggggtaagttcttcaaagctggtatgccgccggacaacattcataaacttttctgcgttcacggtggcttcctgtgctttggaaagctccgcttggatagcggcggctctttctttcagttcccgttgctctgcttcatagtctgccgacagctctgtgaaacgctcgtctgatatgcgcccggtcacgctgtcctcatacagccgcttgaagatagcggataactcggctatgcgtttctcggcggcttccagttcctttttcttggcggcgttcctgcgcttgcccccgtcctcgttctgctcaatcaagagcttcataaaccgggcttcatgctttgccgcatagcttgtcactttccgcagattggagagtacaccggcggtcaagaggtcggtgcggataaagtgcgccgtacagtcatgggtgcgtttcttgtagttgccgcagatataacagtcctgcttgcgcttgtctgtctggtatcgctgctgatacatgacgctgccgcagtccgcacagaacagtatgccggagaacaagcccacttcatcatagcggttggggcgtttgcgctgcttgcgaagctcctgcacccgttcccatgtttgcgtgtctatgataggctcgtggtggttctcgaaaatcacttgcttttccggggaattttctacactgtgcttgactttgtaagaaagtttttctgtcttgaagtttaccagacagcccgtgtattcccggttttcaaggatatgcacaacggtattggtcgcccacttgcactcatagccggggtggtagcggcgggtgctgcccgtcctgcggtattccagcgttcccggcgtggggatttgctgctctgtgagcatacgggctatcttggtcggaccattcccggcaaggcagaaattgtatatctgcttgactacgggtgcagcttcctcgtcaatgatgaaattttcgtcctcgtccatgaggtagccatacacaggcttgcttgtgataggcttgccactcatgccttttgagcgtttcactgctttgattttcttgctcgtatctctcaccagccattcgttaaagatattccgcagcggggcaaaatcattgtcgccctgtgcgctgtccactccgtcattgatagcgatgaagcggacacctttctgtgggaaaatcatttccgtgtacattcccacttgcaggtagtttcgccctaacctcgacatatcctttacgataactgtcccgacttttccggcttcaatgtccgcaagcatggcttgaaaaccgggtctttgaaagttcgcaccagaataaccgtcgtccgtgtaccagcgcagattggaaaagccgttctgctttgcataggtttcaaggatacgcttctgattggaaatggaattgctctcgccttgcagctcgtcctcatgggaaagtcttgggtaaagggcggtaattggttgttggttggtctgtcttaacataaaatcctccgtttccgacagccagccccactattccgtaccttgattgtaccacatggggcggctgtctgtatagcggcaaaagcgtcaaatctgcttctttatggtcggtcaaatcgccgttttttgtgtagcagcttccgcttccagcactttcatcatcttgtcggctgcggtgtcggttgcgccctgcttgaagaagccggaaacggtaaggacggagttgcccatgcggatttccgttacacagtccgggcggcggtctgttttggtggtgcttgtctgtttggtttctgtcataggctctcctttcgctgcttcatcagttgctttaatcgttccagcttttcctgtgcggtttcctttcggaagttgctacccgtgaagcggacgggggcgcacatggaagtcagcctgtcatagatacgggcgtggggcgtgtcctgcgggtgctgcaattcctccagcgtgaggttggtcgtggcgatcagcggcttgccgcttcggtaacggctgtcaatcacgctataaacctgttccagcccgtattctgtccctcgctccataccgaaatcatcaagtatcagcagggggtagctgcaaaggcgggaaatatactcattcctgccctcaaagctggcggcaaggtcattgagtattgttgcaaagtttgtcatgcagacggcaacctctttttccataagggcgttggcgatacaggcggcaaggtagctttttcctgtccccacgccgccccagaacaggtagccgatattttcagcctgcatggtttcccagctctccacataaaaacgggcggttgcggtctgcgggtttctgccgttgtcatgctcaaatgtccagttccgcatagcagggtcggtaaagccccggcgtttcaagtcctccactgtttcaaggtgcttctgtcggctttcagcggcttcccgtttttcacgggctgcccgctggcagtcgcactctgtcgggtgtcggtcatgccctaaccattgggcggtttcttttgaaaaataggcttctttgggcgtatggcacttgccgcagtataaaagcccgtcctcgcctgtgtagtcctccgcttcggcggtagtggctgtaatgtccgtaatcatagcttcaatcccgtttctcataagctctcgccctccttgcatgaataatcgggtatgccttttttcggcggtttcttggcttcgtcctcctgcgcccacttgtatatcgtggctgcatggctgcggtatttcgttcctttggacgctatatgagtagataagcggtcaatataatactcccatttgtcgggcagttccgctttcagctcgtccagttccgtatcggaaagaaaaacattgttgtatctgccatagctgcgggcgggggcttgtcccgtttctaactctctctctttttctatctctatatctatctctttctttatctctatctctggtggacgaatgtcggacaaatgtccaccttttgtccggggcggtaaaagtgccttgttttccagccttgcagcccgttttctttcggcttcggtagaggattgtcctatcatcagttcaatatcggtcatataaaaagtcccgctgtcaagctgctccacaagccccaactgccggaaaatctctaaagccctctcaactgtccctatctggtggcgggtcagtgtcgctatcatctgcgctgtgtaggggatatgctcgtcaagctgcaatttcccgccgtttttcagcgattttaagtacagcttcaagaggatattggaatataaaatcccgtctttcatatcttccagcagcacaatggagtcgctgtcaaaaaagttctctttcagcttgaggtagtaatacttgcggttatctgccattgtccctgtcctcctttttccggcgtttggagtagtagtgggggcagagtatgataatcgcccggaagctctgcttgcagctatgggtacagccccggcagaggtcgttgtatgtgatacggtcgcaggtggtattcccgacttttacttgccgcaggaaaaaagaccattccagccgccgtttcttgctcattcttggcatgggtgcgctcctttctgccgtttccgctggtgtggcggtatcggcggtaattctgtatcatctcggtatcattttcggggtttttctgccctgtaagcccgttaaaaaatcctttggtattgcggatagggtacggggcagcccccttgttctgtatgggttcgggtacattttggggcggtttttatcgctcctgttcctgctttttcacaggcttgcgctcccggcgtaaaatctggtcgatattgcccttgaccgtctgtaagcggcggtattcctcccgttttgcccggtaatcgttgtaaccgctgtttttctctttgataagggtttcaatctctgcttgcagggctttatagctcggcagcttggaaatgccgttctccctaaaataacgggcggctgcgtctgctatgataaagtcgctttcgtgcttctgtcggtaggctgcttttgctttggtgtttttctgctgtttcagcccgtcccggacagggcgggtcttggaataggcaagcacctgccgttgcagctcctttttcccgttcagcgtcttttccacctgcttcagctctgtaaggctttcctgcatggcggcataggcggcagaacaggcttcgtccagttcctccggggaagaaaagccgtactgctgataggcggtaacggtagccgccatttgctttagattgtgctttgccgcccagcggtcatagcctactcccttgccctcagctcgcttggcttcccggtcaaccatgcgctgcaaggtgttgtctgccggggtggtttttgcggctttttcctcccgcaagcgttccttttgggtgtgtgggtattcgggtatgggtgtggtcttttcggcggctctgcgggcgttctgtgtaagcagggcaaggacagtagccttgtcaaaatcgtcccccagcttccgggctgtgataggctttgtcctgtccggcgtgaggtaggaaagccgcccccggctctccttgacggtcacaccctcccgcagcaaaagggaagaaaactcgtcaaagctgccagcttgggaaagtgcctgccgtatcgtccggcgcagcttcgccttgtccgtttcaaacttggtgggcttggtcggctgtccggcggcttctctgacagcattctctttatcaagggcaagctgccctttctttgccgcccagtattcccgttcggttatccgttccttgctgccgttcaagaggtcgatttggtaaagcccctcccggtggcacatctccatgacttcactcttgaaatattccatagcggcattggtgcagcggtgcttgcagccctcccgtgtgtcggctggtctgtccatgtagggcagaagcgggacttcataaatccgcagggagttgatgacgatatgcacatggatattgccgctgtggttatgcccgtccgggtgggtgcatacaagggcttggtgtccggggaaatgtgccttgcagaactgctcgcccagctcctgcgcccggtctacggtcaagccgttgtctgtcccgtcccgtgggtcaaagctgatgatatagtggtggcttttcacatcttcccgtttttggtttttctcatagcggagattggctcgcatacaggcaacggcgaaatccccgtccccgcagttgagggaagaaatgcggtaatcctccctcggtatcagccgcccgttttcatcaagggtgggcttcatggtaaactcgtcatgctcaaatgtgagataggcttccgctgcgccatagtcggcatttttagagctgatatgtttgaatgttgccaacagcgtcacccactttctgcaagacttcaaactttagggcagcaaggtcggaaaccgccgcccgtacttccccggcaagctgcggatagggactgtgccactcgttcagcgtccgggctatctggtttaagttgccgcctatttttccgtattcggcggtcagcttcccgacagcggcaagcagctcgtcgttgacgggggaaacggttatgatggggcgtatggttgccccggttatggcttgccggataaactcggcttggctcatgttgtaggcagaaagcctttccgcaaactcggcgtattcttcctcggtcatgcgtgtcttgactacccggctgcggtgcggcgtgttgtatcgttttcgcatggtaaaacctcctttctgtgcgtggtgtcctctcactaataggagaaaaacggggtgtgaagcggaactgtttttgaaaaatccgaaaaaatattttgagggatttttaagcggcgcaagccgcataagcagggtttggggaaggcactccccaacaagattcccgcaggggcaaaatgagcgaaaagcgaattttggtactgcggtagaatcttgctctaaaaaactaccgctttcctcggcggctctggtttgcggatatactggcttgctccaccaatatagcgattgcggcggcgtgttctgcccgctgttcaccactacaacggtgaaaagggggcgttttggcaaacgcagcggaaatttttttgttttacctgtctgctccctacaacaatccggcggtgtggtttgccaaagatttttgaaaatgggcgcaaaaaaagcagtaaaccttttcaagatttactgcttatctgccgctgtgatgggcggcggtattaaattgtcagccgtttttcaaatggaatttatctgcaatcgctttctttctgctttccaattccttttctgtaatcttccataatcctaacgcaatgatctgctatcttttgcattccgagtttttcaaaaaaggcaatttgtattttcatcatttcttcacaaacagtcaacttctgctcatccatattgctaatagcaagccatgggaacgctttatatttcttagtgtccccaatgagaaaattgtaccctatcaactcattttcacggaaaacgaaatagaattgtgggcctgaacctggaactgacttttccataatttgctgcattgttttcacgccgccgtatgccggaaaaaaacctattcgctcaagagcatttaatatgtcaatccttttatctgtgggtatgtctctataattgataatctgttccatttgctctaccctcattgaagtttaatttgttaggctctaattatacaacttttctgtttagcggtcaaagtggaacttcaacaggctttctatcagttgcctgacgatatgctcctgcatatccgtgttaatctgtccgtccattttcgcacaaaagcggatatatcccgcataatgggataggacggcggcaacagcttccgggtcgccctcgcttgccttaacgattgtctcatagggaagtagctggctcataggacaaaccctccaactctgcccgtagccgccgtaaaatcatctgaatacgccgcccggttgtgttgccagcccgtccatatctccgtccaatctccctatgcgtcaatcgttggaagtagtacaagaaaatgatttcctgttccatctgtgatagtgcggacagggctgcggcaagctctgggctttccaaaagcaccatctgaccacagacgaaaagcggatagctggtcatgccggattgctccgcaaagtatttatctgtggtactgaatggatagtgtttttcttctatcagatattcaagcgagatttcccgcttgcggcggctccgtatgctccgggctgcgtctatggcagcgtggcgaataacagtcttgcaaaaggcatcgtgtgtatgccggatatgttcttgatacttttcgtgttcggtcatggaaaatccccctttctgaataatggcagagggcggcagcatcttgtgctgtcgccctcttgattaccgaacagcaaagacgggcggggctgtcaacagcggcgcatttgcgccgttcatcttgaccgttgacaggctcggctgggtttgctatctgctcacggcaattcactctcattgataggaattgcttcaagttccgtattcaaattgttccaataagagccgatatccgcacttgtgaaatacttaaaaccgcctgctgctgacttcaattcgccgtttttaactccatagcaggcgtaaatcaaatcgtagcttgttccatctgagaggttaaatctaaagctggtcacagctgctccggcagtttcctcagttgttttgtcttttaaggataagcccttgaacttatcatacagggtctttatatcattttcagcaacaactactttcttttctgctgatgcaggcactccgtcatagtggtacatttcaacgctttcgacatcttcaacctcaaatgggaagtcgattttgacaggctcataagcaatgtttataggtaacagaaagagagctgcaaaaattgcaatgatacaaagagcgatggaaacgagaacagcaatcgttatcttttttttgcctctctgcttttcttttgcctcatggcgcataataacgctttcgctttcttcgtgaagaacatcttcgttcgtgtgagaaagcaatttctgataaattgcgttacagtcagtacaggcgttcaaatgctcttttaccatctctgcgcttgcttcgctgcaagcaccgtcaacatacagcggaagaatatctcgaacaatatcacattgtttactcatgcttttcatccatcctttcttgaatttttagctttgcacgatgataagtaactctcgcccatgattctgtttttccaaaaattgcagcgatttgtgaaaaagatagttccccgaatacgcgaagctgaaagacttctttgtatggttcttccaaacggtgaagaacgaggtgtatgcggaacgccatgtcagaatctgcaactgagttctcaacattttcatttgatggcaagtcattgatttcactcacatcagctactcgctgacggcttcgcatttcatcatggtaaaggttttttgctatggagcagagccatgtcaattcatctgacttacctttgaattgtgatgttgtagaaacagccttatagaatgtgttctgcgtgatttcctctgctatctcacgatttttggcaagagaaatagtatacgagtatacctgtaaatagtaggctttatagagcttttcatagtccatacttgtcatcacctccttcagcttcataggttagacggagaaatcggaatttcgttacaaagaagtttgaaatttttatacctttacgctactcttgctttgtgcggactattggtagacgcgcattaacggcaagtaaagagattgctgtgtcagcttgatatgttcaaatgctaattaagtatagcatacagctatgaatttttctattgcgttcccctgacttcggaatagtggcagggctggctatccttgttttgctttgtgcttctctaccgtacatgagcattgtcataaggcatgaatttcacagcttccggtgccaggtaagaacgtgtacccacaatggtcatggacgcatccacccattctctggccacgccgaaatcccccagcttgaattctccgtccttggatacaagaatattgcccggtttaatatcccgatgcaggattccctgcctgtgacatacttccaatgctctgcacagctcaattcccaagcgaatgacttctgtttcatccaaaggcccttcctgatccataaaactcagcaaatctgtcagatattccatctgaatatacaatctgcagtaattctcctcaggcatcttctcaatacagctgcctttgagctgtacaatatgcgcctcacctgccaaagattccaggatagaaacttcattgacagctttattaaacaatcgtgaaaagtttctccgggctttctctaagtcattgtcatattcacgaatctgttccgttcccaattcccatgaaatgactttaagggccgagaattcttcattctccgcccctctgtttttcaccagtcggtaaacggcgccatacgcccctttcccaagcctctggtcaatttcgtagccgtggtcacgccactgcatcggcaattccgggaattgctcttcagacctctccaacatatgtattctccctattgtctaatattttatcgaagcatgcagtcaaatgtcagcactgttccgccacgaagaccggatggatcctcctgcatcactttggcacctctttgaacaaagtacttgacaaaatcattgccaaacacctgcccattgaacatccacaatgtcatcgttccatgcacacggcagtaaagcagaagcacattcagcatattcaccagcatacccaccggaatattctgcacctccggctgtctcatgcgcagttcaaaacgaatctgtgcctcgcctgcattgccggccttctcatactgaaacatcaatgcgaaaccatcaatatcaacccggatatcataaaccgtttcgcttgattgtctgctgcggatatctctgacttcaaccccttccagtctcagaaactggatcagataattcatcagctctctgtcaaattcatcattatatcttctgcgcttcttcaaaccgatcttccccgggatagaaagaaccgcaccgttattaccgccttcttcctgtatcagtcgggctccctgtgaaatcagatacatcttccactctctattgatcacattgaccagccacagtgtggtcggctgattcgcagcacaataatccaccagaaaattgaggatcttcttgctcaatccctgtcccttcgttcttccccgcagtaccagactttcaatgcggatctgcggctcatactgaccatcagcgccctcaaagtatatattcaagacaaaactttcatcaaaattcgaaaaacgaagctcccagatattctgctgcacctgtgcttcttctacgccaaccttacccaggaactcggccactgatggctcattaacaaaaaaataacctaattcctgaactaaatggtcttttgcaaatattgtattaaacagatcggcataattcattgtcttctctccttttttaactaactatctccagtatatcacacaaaagttttcttgaatattttttattaaattatgtgcactgatactactgttcttctaaaccagcaggcagcaggcaataacaaaagcgataatactctttgctgccatccacagatccctcttgacggcctgatccctctccgggctgtcgtaattacctttgattgttgtcacgatatcacccaatgtagcgaaaaacaaaaacttaagcatttcataaatactgtaaataaataaaacaactgcgatcatcataagctcctttccaatcctttggattgctgcattttttaactgatgatactattataggcgattgaaaaagcagctttgtaatgataatggtccaaggcctttttctcatcatattatacacctatttccttatgctgtcagtgacaaaagagccccggcagctgctttttcggcagccaccggggcttagagagaatattacaaacactttttcttctgatattatctttttcttctgcgttttgttatctgttttaatgtgcatttttcattatcatgaatggtatcttcactccagctactgcaaagtgtttttatattgcttatattttccatctgtaagttctttttcataggcatcatacgcctcctgcaaagtgttatattcctgaccatccgctataatcttcttatagtcaacctgtgtcaggtggtctgaaatagccacatatggtgacccactacccgttcgattagccgttgttgactcagagacataataatttccatccgctgtactgataacgaccggaatcttctgaccagcgcctaccttattagtatctacagatgtccagtaaaaatatcgttcagaagccttagatgggcttcccacatatgcccaggttcctttttgcaaaagactgttggccggaagtttctcctttacctttggcagcatgcttgaattttgacattttgaatctatttcaaaatatgtatttttcttgttgatcaaatccttcagtaccccgctatcatttaacggtttttgcaaatcctcggtgatatcaaaaaagtacttcttactgctgtcttcatttttacctttccagtcaaataatatgcctttctcaggattgtaggatacttcacatacaccaccggcaacaggatcacctttccaatgatcggtatccggatcgccattggaatgagagattccggcaattgacactgtatttgatgactgccatcctgctttttttgtttaagaggaacaactttgagaacatctttttcttcctctatctctgcagcaatcatcacttcaccatatgctgttcgtacattttctaaatctgttgactctgcacttctttcgacatatttagaataagcaggcgccaaaattccaaccagtattgcaagaatggcaacaacgattacaagctccacaaaagtaaaacctttgtttttatttttatctatatgcacttttgttacctcgttcggacgttttgcacttcttttcttctatcgttaactttagtatggcatattttcatcagtttctgcctttaccagcgaaatcgtaccgttatccagacattccacaaattttacaaccagatttggatcaaattgtttgcctgcatcctgaagaagcttctctctcgctacgtctaacggaaacgccttcttataacagcgcttggatgtcatggcatcaaaggaatctgccacgcacaggatacgtgcagtcaacggaatatcttcccccgcaattcttcgcggatatcctttaccgtcatagcgttcatgatgaccgatgacagcaggaataacataatccaacgatggcaggtgacgaatgatatcgatcgatgcttccacatgccctttgatcgtctcgtattcttcatctgtcagacgttctgctttatttaatatatattccggaataccgattttacctacatcatgcaagagtgctgcctgacggatgatctcaaccatatcctcgttcattccaagtgttgttgccagtgctgttgcataataagccacattcgtggaatggctaaaagtataatgatccttcgcatcaatagctgccgtcaacgcataaatcgtcgactcatactcccgataaatatgttcgcggttcgttgtgttttcatttttattgttacggaacatcgtatcaaagacctgtatgccattttttccactatgtttcacatgatacaccgcaagatccacattttccatcagctctttaacattttttgcagcatatggtgcagcactgattcctgcactgactgtgattgccttcagtttcatatctgttctgcgattattcataacaaaaatctgtttcgaaatagattccaccagatttctggcagagaaaaggtcatatctcggcaataaaacagcaaattcttttccgccatagcgggccgtatagccactgtctcctacactgcttttgatgattcccgcaatacgctgcaggcaaagatctccttcttttacaccatacagctgattatataacttaaaatcatctacgttgatgatcgccaatgccagtgatgcctctttgtttttctcaaactcttcattgagcacttcatagaaatatttcctgttcaacaaaccggtcatctcatctgttctggcttccaggcaggcgttctcatacagtctcgcatttttaatcgcaatggatgccacggaagtgatattggagatcaattctacttcatcatacaccactctcttttttgcagaagaatctgtgatcagaacaacccctaccagattatcgccatcttttaatccaacgcagtagcgtgtatgatgtttatccagctgatgtttctcctcttcccacatggacttatattccacagaataacgaaaatccttgtaaacgatcggttcctcatgttccttcaaccactggatcatcggattttcttcgtccagagcaaacgccagatcacttaacggctgatcactcgccactccgcgatacggctctccaggctcattctgcatacaaatatagatatttccgacatccatcaactctttcattacacgaatcgttctatccagaatctcctgcagatccagcgtttttgaaatcgctgaattgaattctctgatcttctctgcctgatgattttcttctctgataaacacactgcgtatcaaaaatctccataaaaatgtaaagaatgtataaatcaccagaaaaacgatagaaaaaataagtgtgtataccgtcatgttcttatccagctgtatgtgaaaaatcttttgcaaggatggaacaatatttaaaaaaacaagaatggaaaacaaaaatcccacaccatagcacaaactggtagatgccaacatctgcagtctgaacagccgtctgcgaatcagtgcataaaacagtaaaaatacatttactacaccacttaaaatatcgattggaaaaccactaaaaagcggaattccaagaaacgcatttccaaggaacaaagcgagaacacccaacatcaccggttcatactgcacctttatattgggattttcattgcagatccgcacaagaaccctaaaaagatatagcagaaatattcctgccggaataaaaaacactacaatcgcaggtttgatttcatacacaaatgttgaaattccatttttatccaccacattcggggattcgaggaagattccatactgcacattcaaccaaaagcaaagcagcataaccgctaggtatattttcccaggagcaccgttctttttccctccaaaagcgagtataaaacgacaatatgcatatggcagcaataagatgccaagcagagaaacctgaaaccagaattcacaacctggccagaactgtgcacgcataaaagcagagcctccggtccagaaaagcagacccaaaagcaccaccagaaaactgtttattattttatttctctttgccgccaaaaacattaacagcataaagccatagcacaacatggctatgatcgatatatatccataggttcccataaattccccttatcccattcttttcttctctacttatctcactttattcaaacactcctgtacatccagaagttccttcagatcataatgcgaaggactcatctgatgtattttctttccggtctttttctcataggccgcaaaagttccacatgtaaagatcgttacctgtaaaggatccattcccaaaatctttttaagatcccggtaatcctggtcgatatatttaaaatatgtactcagtaaatcctttaaaatagttgcactcatagccgtattaagcattgcgtccctttccagctccacatacatatgcagatatggacgattatgctcattgtattcctttgttgcaacccaatttgtgattggaagcttcgaaaggccgatcacacttcggattccattctccgaaatcctcgtaaatccggcaatatcaatgatccacggtacccggtctacatattcaaagcgaggaatccttgtctcatcatcccgattctccagtccgacacaacggtacatatcgccacaacggtaacgggcaaacgctccacctttcagaatggtaaatacaagctcatatttttctccggggcgtacttcatccatcagatacgtcggcggaatgtaagaaggatcctcatgatttttcatcatatccttctcggtaataaattcgtaaaatgccgtatccgggaagaaatacattccttttcttgtccaggtctccgtacccatgatagaaggttccgtaccggcaaataattccatcggccgaatcccccagagcgcttcaagatcgtctttataacacaggttatctgtccccgccaccataaagcctttcaaatgaaacagatcttttggaagcaacggtcggttctcttttttacagcgatgctttgcctgcagcagacgaagaatcatatgcgctttacatttcataagctctgacagcttgatgccgccaccaccactcgtcatggaagaaagacttaaactaactgcataagctacactgcccagcccaaagaaaaatccgagatctttcttcattgccatcttaaaacccaacttgtttctttcgctgaagctcatatttacagcatcttttaccgctggcaagaattcaatattgatttcctcccccagtgccagtggaaaaagccctgtagcaaaaggcagcggtgcaagcgcatacaggaacttatctgtagctgccacatcaaaagagcccttctctttactcgtcgataaaatcagacatgctgtgacattatttcgatacgtatccagcatacttctggtatacggtgccaccttgatcggatgctttccaccctcccaggttgtctgtatccatataacaggatttcccggaagcatatccggttgcttcgtaagcaaaacatccgcataatcttcataggttgtcaatggtaccatttttcggaattcatccagatttttcggatattttccttttaaaatggattgtcccaaaccacagttgctccacaaccggatctgttcctccatcaaccgccgctgaatcttcatatatccatccatcgacagatccaagaatccacagtactgctgccagatttctttatactgttgtttttttaatttctcttccaaattcatagattgctaccccagatcaatcactgttttctgatattatataaacatacccgtatactatctctattcggtattaaaaaaggtgtatttttctgatattccttataattaaaaaatgtctgtggaaaagtccacagatcctgaaaaatgatatacagataattccagaaaatcataagcaaaaaatagatcccctgtttccatccgccaaacattccccacatacaaagatatgcacctgcaaaccacaaaactccaggatgacgacacacaccatacataccttctgtatatgcagcacgcaatttattatcttcacagtacgtttcttcaaagggaagggcaaaaaacaaggtgtatataagcagtgcaaagaagcctacggctcctgttccaaagccgatcatccttccgattctgtgctgacactgcccccacaaaaacaaaagttccatgagcagcgatacaaccacaaaaaccgtacccactgcaaaaaatttttgaaaaataacattcttctttcgaatgctattgatatcatatataaaatacaggagaaatccaaaactccccagaacaatctgccacatctttccactccagattttgtgtctaactaatagtacaaatagaattcgtcatacatagtaaattataatataggagaccataaatagcaagcgtattttactattcaccaacaattataggattgcaccatatcagctttttttgtaacttttttaattacaacttcctttaaaagttttacattgattatgacaaacaaaaaagactccggaaattgtaatgatataatcacgcatccgaagaattgtcacaccgcctgttcctcttgcaacttcaataagaccggcaacctttaattgttgcaatattttacgaacaatcaccggattagttccaatatatcaaaaaatagatgtaatttcaatggttacactgttattaaaaacctaatataaatacaatcaatagtctgctttagaccgaccacctttggataaatcagattgccctccacctgctgcaaaatgagtagaaagagaatgaaccacagagtcttgcctggttctgccagcagaatcaaaaacgcaccaagaccgccgccgatcagaaacggattgaacagtgcaagcaccttgcctataaaacgcaaaacagcttcaaggtttaccagcgcccatgcgaatacaataagcagcaattttgtgattttttctccatattttttccttttttgatattatgataatgtcagtgtaaaaaaatcgcaatggtacacgttcttacaccataccattgcgatttttccgctcgtatttatattgatacatatcccgatcggctttctctttaacagcaacaatgtccccacatgagaacgaagctgatccataagaaaccgttggtaaaaatgtaatctttcttcgcttttcttccagccgatgtaaaaattcctgtttgcaccaatcttccttatcagcgtttttcagaagtacacaaaactcatcaccgcctatgcgataacaatatccaaaatttgcgtaagcttttttaatacattctgcaatctcagccaagcaaagatccccttgcacatgtccataactgtcattgatctgtttgaaatcatccacatcaaacactacgagcacgcttgctttacaccccatcccacccgtctttctaagatagctattctggttcaatagcccggtgagtgcatccagctgattccacatttcattacaataaataaaatacaatacagaaagcagtgtaatacataaccaggtaacatggagtttcggaagaacaacctgaataatcgtttctgccatcacaaaaagaaaaagcggatagattaacaatttgctgcgattctgaaattctctggcattgataatcgtagataccgaaagatacaaaattgccccaaaatacatgataatatatatataaaaatgtggaccacgcgaataaatattgtctgcgctcacagagaatacaattccgtatgggatagtaacaaataagaaaatcaaatatccaatttcaaaaagtatcgcagtcctgatcttacgacgaaagactgttttcctgtccagtacatacacaagacagatgcacacagccggagacagaccaaaccccatataattggatgcaacattcaaccagcggtaagcaggcggcaatccgtccactacaagggtaataacttccagtatcgaaatcccagcaatcagaacaaaggccaataaaaaaccacgcttttgttttctgctaagtgattcactcaaatatgtgagaatacacataaagcacaaaataaaaaaatcgattatagttaatacacaaaaatatccattcattgcgaacctattctttcttttttcttctgaaccttaacttatattttatcaaactttgcgtgaaattaatagataatattaaattttcctcaaaccattgaaaacactgggtttatcggaatgacagattttatccattttccaaaatagattacgatagctgtactcattatattttcggaaatcggaaaataaaactcgttccgataccttcgatactttcgacgtgaatggttccattgtggaggtttacaatccagcgcaccatagaaaggccgagaccggtaccgccattttctctggaacggcttttgtctatgcgatagaaacgctcccagattttgtccaggtgttcctcacttattccaataccatcatctttcacttcaccgacaatctggtcattttcgaccttcagaataacatgaatatgtccatttgtttttccgtaattgatggcattggttattaaattcatcatcatacgcaaaatcaatgtctggtcgccgttcataaataagtcatcctgcttttgcagggtgatctcaatatttttttcctgtgcttttgtctgcagttcttctattacaagttcgcttaataatccaaaatccagtttttccatcagatgctgctcatcctgttcgtttctggcgatcattaacatttcgcttgtcagctttgacattcgttttgcctgccttaagatgactgcaatctcttccttatcttccgcagataagttttcattttccaataagtactcacactgggaaatgataacagcaacgggagtccgcagttcatgggatacgtctgatgtgaattgacgttccttctcaaacgaaaattccaagcgctcgaacatttcgttaaatttcttcgacaattcgtataattcatcttttgcttttggcagagacaagcgtttggaaagatcttttccattgctgatgttttcaacttcatcgcagataagatccacctgtctcaatgcctgcttgatcataaaatatccgatggccccgatcagaataatgagtaatgggaatacaatcaacagcattttctcggatgtctgcatgaaaagttctatagaatgtacggaggtaattcctcgtacccacatttcgtcatcatcaccgtaagtgtaaacgctgtcatataccatccattttcgatttgattcgcttatcgttcgcggtgtattcgacatgagaatagtttcttctggaaattgagctggaatcgttccataaagtaatcgtccgtttttgtcataaatacaaaacataataccgttatcgtaaaattcggtatcgccgtcaagataaaaggaatcatcctgaaaattaatatttgaagagaatccggtcactgcggcactgatttcttcttctgtcgcagaaattccaaccctatccacaaaaagaaggacgagaactagaatagtcccaagaactacggcgatgattccggtgtaccatagcgtaatttttttcttgatcgtcatctgtttcattcgttttccctcattacatatccaacaccgcgaacagtgtggatgagtttttgttcatattgtgcatcgattttttttcgcaaatagcgaatgtatacgtcgatcacattggaaccgccttcaaaatcaaagtcccacgcattctgttcaatctgctgtcttgtcattacgatatttttgttgcgcataagacattccagaaccataaattcttttgcagaaagatcaatttcatttccggctcttgtaacctttcttgtgtcacgatccagaataagatctgctatttttagttgattggatgtaaattgtggctttctacgcatcatgacacggattcttgcaagcagttcttcaaatgcaaatggtttgatcaggtaatcatcggcaccaagatccagtcctttgacacggtcttcaatgctgtcttttgctgtcagtaacagaaccggtgtatcatcttctcgttgccttaattctcttaagatttcatatccgtcctttcccggcaacatgatatcaagaataataccatcgtaggaagtcatatcgatataatccatcgcttccagaccatccccacaggcatctacactgtaatgttccttgacaagcctttttttgacaatgtttcttaaatcattctcgtcttctacaatcagtaatctcataatgtaattattataataccaatcattttcgtgtgctagagtcctttttttcattttttgaaattactatttgttttaatctttttttaatcttccccctatatgatacatataacagcaaaaacaaaacatccaagagacggaaggagaacacgttatgaaaaaaatattagtagttttattatctctcacattaatatttgcttttacaggatgcacttcatccaataatggagcagcagaagatatagaaattaagacacaggaagttgtaacatcaaatacagatgacaatgatgataatatcagcaacacagaaaacacagtagagaatgcgaacgaaaaggattatgatttctcttcttatgaaaacgatatccgtaatataacaaaaagtgtaaacaatgcaaaaacatctacaaatgcatctgagaatcacgaacaattctacgctttgaaaaaacagatagacgcagttgatgacgaactggataaacttgatgatgaatttgagtatgcttaccagatgaaagagattagcttcgagatatacaaagcgagagaacgcgcgattgaaaaactggaagatgaactggaattagcagaagaagcgctggaaaacaaatacggcattgatgattaattccatccgggctacaagaatgtggcagaactttcttaatttctaaaatcgggtaggaggtagataattattttatctaccgacctcccacaccacctggcatacggttccgtaccaaggcggttctttagttttcacaaactgttagatagtagtcaagcatggatatatatcccagcttggctattattttattgatgattactgaatttagcacctgtgccattctccatataatattaaattttgtgtctatgttttatgaaagaatcttctcttaatcaatttttctttcctgtagctttactttttcagttttaacccatctttgaaagcttcacccacacgctctgtatcctcacgaacaacaatccgcttatacttgtcaatataaagtcccttaaaactaagttcctctttgtggataacttcatgtttcaaaacatctgcttctttgctaatgcacgataaaatacgattgagaatattctcttcattttcttcaaatgccagtatcactattttcccatacaatcacccactttatcaaaagttatatctttcgtttagtcttttcaacgaaatcaacactattaaaaccattcctctgaaaatgtttctaccgctcaacgacttttctttcgctgtggtacggcagataatttcaacattcagttccagtatcgttattcgacattaagttctactaatacaacctctggacgattattaaatcggaatggaataatactatttccaagaccacggctaacaaccatatttgttattctgtctgtataaaggccggaatcatatttaggaaacagcccttgattgggggcaacgagccccccaataaaaggcaatcgaaactgccctccgtgtgcgtgaccacataaaaccagatcaacaccgcagcatacataggtttcaaataactctggccgatgtgatagcagtatagtgtaactgttttcgtcatcaatgagactattcaattttgtgttgaccatggctggtacttcattaaacatatcgcccttaatcgtaaagtcaggatcagaaagcccgataagggtaatcatttcgttgttatgcactaactgtattgcttcatcttcaaggacagttacgccagacgcttcaagccctgttttgaattgatcataatgtgagaagttagcttcgtggtttccagttacaaagtagacaggggctatttgaacagctttttttacaaaatcaaacgcaatctcaatgtctgtatgtccagcatcgattaaatctccagttatcacaataatatccggttcgtgttcagacagcaattctatcaattctgtattgctttctccaaattcagcattatgcaagtcggacacttgtgcaatctgaaaattagaaaaggcagatggtatgcgatcgctggagatattaactgtacttaccatcaatgctgaattaccccatacagtacagattatcaaaaccagcagtatagtcgttaatacaccaatcttcaccaatactctggtggaaagaatttttttcattttttcctctctttcatcaacttaattataaaaaaaacagcttacaaacaggtgaatttcagcttacgaatttgtaagacaaaagcgggtggcttctaaatccacccacttcaaaagtagaatcactgtgcactgattgtgtcaacaatggacatattgtgtattctcttaatcggcccgtacaccgccacaatcgcagatagtacaacaatcagtagaataatacccaattctttcaaaggaattgtccaagtatcaccccatttataactgatcaacatttcgaacaataccttgttgcttaacagtcccaaaatggtgccaactataccgccgattatggtataagtaaaggcttctgcaactatcattttcctaatctgtcctgtactaagcccaatagcgcggaaagcaccatattgctttgatcttgatgagacgctcatagcaatactgtttattatgttaaaaactgtaatcaatgcaatcaaaacgagaaatccataaacgaacaaccagaaacaataatatgttcccattgtactgctgtttcccatacgttcatcggagaaagtaaatgtggaatccaccatttgatggatagcataaacatcttcatcggttgcttctttggttaactgcacatcaataatcgtgtactttgattcaccagtaatttgcttaaatgtatcctctgaacagataattgttccaacacctgcagcactataaaacggacaatcagatagtgttcccacgatttgaatttcttttttttgcccgcttatattcagtgttacagtatcaccaatttgtatagtattctgctgctcataaacaattaaaccagttcccacatcgttttgtgcagattcaagagaaccttctaacaaatagtctttcgcccaatcaaattgatgctgctcataagagatcaaatccacctttttttcaataccatttgttacagatggaacctcgtaggcaaacattcttccatacactaaatccacaatagaattttctttcaaatcttctaaaaatgttttgtcaatggcgcaagaattatcagggcttatgatagataaatccgctgtccatggatgaagcggcgttaatgtatgctgcataaactcgaccgttacggaaaacgataaaaaaaggataatactaagagcaaatgagcttgtcatcaaaagtaagttttttcggcttgcttttgcatgatgaatcccaagtgcagtatcaatcttgaatagctttgtattggcggcatttctggcgggtttcaaagtatttgcgctaccggaaaccgctgccagaggagatacctttgccgcctttttggccggggaataagcagctaacaaaaccgtaagtaatcccacaacgattcctgccaaaatgctcggaatgctcaaaccgaatgttggcatagcctcgaaatattctgggccaaggaagcgtaaaactgcacacaagacccaaatgacaactacaccgctgaaaattccaatcggtatcgccaaacgacaccaaagcagtgcttctttccgaaccagccgcataatctgtttcggcgttgcaccaatgcagcgcattaggccaaaaaattctgtacgttgtgctacattactgtttaagctgcttgtaatcatcataatgccagcaagcagtaccaatacaaataatattgccacagccgcataaaccgacatcaaaaagggattacggctttgtccaagcaaaccaagcaaactattgtttgaagatacttgctcatccgataaactacattgctcctttaagtttgcaattttttcctgtatatttcttgtatttgcaaattgagcaaaaaacatgatgccgtaatcattcggctccccgtctgatacattcggataaatcgcgcagtaatcctctgtgttcaaaataatgccgtaggagtcgccactcatgatcgagtctgtattattcataaatccagatatggtaaaattcagtttatcaccatcaggagtttcgacggcaatggaatcgccaatcgcaacacccattatctgttttacattttcagtcaccaacgcttcattacttgcctgtggaaaaacgccatcttcaagttgtccagcccagatttcggttatatagcttttatcacaaccgcatatcgctacattttttcctcctaaagtgtagcctaaatctccacgataattaagtacaccatacggcgaaaatactttaacatcggggcgtgaagcgataattgacgcttcttcgttgctgatatttttgatggcgatatgccagtttccatattcctgctgggtctgcaaaatctggctgcggacgaacatatctgccatgccaaaaattgtagtaaccagaaataccgccagcacaatgcagaaaatggacatcctgctttgcttcctgtggatctttacagatatgggaacaagatcaagataacgcttcatttgtttttcctcccaaatccgtaagaactccatccgatacccggaatacccgatcaaccgatgcagtcagattattattatgagtaatcatcagaatggtttgctgataacggcgggacgcctgggtaagcagatctatgacatcttggctgtttttgctgtcaaggttgccggtaggttcatctgccaaaatcaatttaggcttggtgattaacgcccgaccaatggctacacgctgctgttgtccaccggataattgattcggcaggtggtaacggcgctccgtcaaccctaataactccaaaatttcttctactgctgtcagatcaggttttcggtagtccagaagcagcgggaacataatattctgctccacattcagctcggaaacaagttgaaaggattggaagataaatccgatattacggcgacggaaaattgtgcgttgttcctctttcatagaaaacaggtcttgtccatccaccaaaatcttgccagaagatggagcatccaaagcaccaatacagtttagcagggtactttttccagagccggattctccgacaatggcagcaaactctcctttatccagtgaaaaggaaacctttttcaaagcttccacttctgcttcgcccttcccataggttttacataaatcatgtactttcaatatttccatagtatgagtacctcctttccttaaaaaatagcaaaaacagcttacaatgagatgaatgtaagcttacgattccgtaaggaaagaaatcgtaaaaatcgtgccggtgtttatttcactttgcaccgagataatacctccttgcccctctacaatagacttggcaaggggcagtccaagcccaattccttgtgtgtcaagagaatgtttgctgcgataaaaacgtttgaaaatatgatgtatgtcctctggagcaataccattcccattgtcagaaataaaaatccgaagcatagccggtgtgtgttcccatgtgatatgaacagttccaccagattgtgtatgatctaaagcgtttttcacgatatttccaatcgcttcactcgtccattccatatcgcagacaagaagctgttcacggtcgccatctaccagaatttctttattttcatttttggccctcgttgtcaattcattgactgaatgagcaatcaactcagccacgtagcaactttttttctcaaaaacaatatttcctgtatctaaccgggttattttcaacatggataagattagctgctccatacgctttagagaagtccccattttggccgcaaactgttttactgtatccgcgttttccggctcattttcaataatctcctgatacatagcgagggcagccagtggtgtttttagctggtgagatatatcagatatagagtctttcaaaaattcctttgttttatgttcggtttcgcttttcgattgaagcatggtggcaagctgctccacagaggaaaatatctggaagatggctccttcatggttctgcggtaggtggcaggagtaatcaccgttgatgtaattggtcagcactttagctgcctgttgatataagcagtttcttttccagaagaaaagaagtatgcctgtcgcgagtattaaaagtaaaaatatttccatacccagcatggtataaaatgtggactgctgaaattgattaacaaatggtagcatattattttcaacgtctgccccaatgccagcagccgccaacaatatttgtccgtcctcgctgatttctgtattagtgagcgcaacagcaattacatcttttggaataccttgttctaaaagggaagaagcaaccgcttcatcgtgcgtaaggtacagtgtttttatatcgttaatctggcttattccgaagatgatacccaggccaaacagcaaaacggcaaaaaaggtcaagaaaaggaaaaatcctctgatttgtttatcccggcatatcctcatacagacacctctttccattggtatccaaacccacgaactgttatcaaatgttctggatgagatgggtctgcttctactttttctcggagccgacgcacatatacagacaaagtgttgtcatcaacaaaatttcccgtgtcgtcccataactcattcagaattatatctcttgtgatgacacggtttgcatttctcaccagcaggcagagcaaacggtattccgcacttgtcaaatccagtattcggtccttcatggacacgcggtttcccaaaaggtcaatcgtaatatctccacattcgatggaaacgcttttctccacgttagaaacaccagcccgacgcagtaatgctcgaatacgggaacacaattcccctaacttgaaaggctttgtgacataatcatccccaccgctgtctagtccgcgaataatgttcacttcttcgtctgatgcagtcaaaaaaataatcggtatctgctgattttgttttctaactttttcgcagacctcaaatcctgttccgtccggcaaagtgacatccagaatcaataaatcatacttactaatctcagccagatacttgattgcctcgcatacagtccgggctacttcaacatcaaacccgttttttttcaaggaatatttcaaaccatcaacaagacttatgtcatcttccagtagcagtattttactcatgcttttgctcctttccttgctttgtccgcccatcaactggtttttgtgctgattttggtatcaaccaaaccgttcccatctttacagcaccaggaatccgtccagcagaacaataataatttatccaacgaggggttacaccccatttttcaccagcttcttttaatgtcatataatccatatcaatccctccgcatgttattataattcgttttctcgaacaatacaagcatatactctttatatatggcacaccttttaggagtgcccaaaacaaacttagcaaacttagcaagcactgcccatgtcatgacacatgggctgaaatttacttttatgccacaggcactacccgtaaatttccatagggaagtatccctaaccctcttatattttttgagtcacttttcacagcaaaatcattgaccttcttctgcaattttactacaatttttcttggataattttatccaaaaatcgaatacattttgaaacaaactgttgtaaaacatcgaccattttacagcagttttttgtacccaaaattggaaggagttaaagaaatggcaaacagaaaacgcaccaatgaatgtccgtgcctgcatttccaccacactctctttgctgaagttcgtgatacctctgtcggcttccatttattcttttcataatcccattcactgagaagctgactgtctgttgtcgccaaatcattatatccggcaagaacttctctctccgcacaaacggggcataccgtacctttcacacgggcattgataacagatttccactcgttaccgcatttactgcatctccaccagacatttttcctcgactttgcatttacttcatcaggcttcaatggcaagttcttctccgaccactccgaaacaagctccgggtgtacttctgctaaactgttattcatagccaaacctcaacctccttgtacttagagtatatgaagttttggctttatcttgtagtttgcgaatatccgtataaatagaaaaagccctttgagaaagagatttctcctctctcaaagggcaagttggcaaactggaattgagatttcatatattcaaagggatttaataactgttatattttattatcaaatatctctcaagcccttgaaaacactaagtttgtcgcaggtgagctttcccttagactttcccttatgttatatcttcccatatggatttatggactctgatacgggaaaatacaagggtgcaggacatccggtggatgtccgctttgcaccgaccgtagcgaagcgaagaccacaagatgtccggtggacatctgctctgtgccgaccggttcacaacgtccagtggacgttggctctgaaccgaccgtagtggaacgaagagcggcagcggagaccaagaaaatcctataaaacagtataacacaaaataaaagtgacatggtgaactgattgaaatgcttctgatttttgcaacaaatgattgatttaacgataaggagatttgatacgatgagaacaatatttgcagaatacaatcccaagcgcaacagtattgatgtttatacctctgttggctatatgctccgcattgactgttgggaagctgaaaaggacttaaaaaccacatcaggatcagactgtgcattaaacgcactcgccattgatgctcctcttgaatatgcaagattatatcttgatggaaatttgcagatgtgggtagatgtggaagactcattagatattttttaaattttaaacaaatacaacagcttaaataactattagctacaatatttccggaacattcatcattggataaagttggctgggtaatttcaaatctttccaaaagtttacacccgcacttttccccatccgacagcatctgtacaatttccagccggttcgcatcgcccaaagccttgcatatcaaagccacatccattgcattcatattgacacctcacattgatcattgtctatgttcaacataatatatacatagatatttgtcaatgtatgtattgtgacatgctcccaccacttaaatcacagattttgaagtgggggcttcttgctcaatggctctactgagccaagtatctagctgttatctcttcccgttttactttggtttgtgttcttaaaaattctttttaggaattttcgggattgttttattattaagctgtcaatgttcattctcactcagtcaaccaattctcctttggaaataccaaacggagaaggagggatttgaaccctcgcgccgctattaacgacctactccctttccaggggagccccttcagcctcttgggtacttctccaaataagctgactaacaagcgatattcaattagtatcccagtggatacagcggagaaggtgggattcgaacccacggccccttgcggagtcactggttttcaagaccagctccttaaaccactcggacacctctccattgcgttatccttacatggaaagtctcacgcgacaatagatatattatcatctcaaaagccaaatgtcaacaactaattttactttttttcaaaaaaatttaaacaattaaggcacttcaaattttatgggatgttccgggcatccgcagtatcttaaagtgccggaacgacaatatacattcccgtacaggcatgcgttatctgttgtctccaccgtttaaaaaggcttctgcaataaccaggtcttcaggggttgtaatcttgatattgcggtagtcgccttttaacaggtaaatggaatggtcggcatatttttcaacaaccatggcatcgtctgtgacggtggtatcccccgcttctgctctttttcgatatgcttctgatacaagggcataggaaaatgtctgtggtgtctgtatctgccacagttttgaacgttccagggtatcggctacatagcccttgttatccactactttgatggtgtctttggcaggcacagctgtaatgcaggcttccttctcctgcacacaactgatattcgcattaataagcacacttgatataagcggtctggctccatcatgaatcagcacataatcacagtccgacaatgcctttaatccttcataaacggaatcataacgttctttgccgcctgcaataaccgcacggactttctgaaaattgtatttctccacaatttctctgctgcaatagtctatttcatccgcacctgtcacaagtataatctcatccacctcagacaattcaaaagcccgaagcgtataataaataaccggtttacccttaatcagcagatactgtttgtgaacggaagttcccattctttttccgctgcctgctgccagaacgacagcggctgttttctttccatctgccgtcattatgctttttctccgatcttcagattcggcactgcattcagatcaagccccgcacgtttgccgttcatataatcataatagccagccgccccgatcatagctgcattgtctgtacataataacggtgacggtctgtagaattgaatattccgtctgctgcatgcttcttccatggcaccacgaagtgcactattggaagctacgcctccggcaagtgcgactttcttaatatgatattcctttgctgccttcattgtatgttctacaatgacgtctacgatcgctttctggaaggaagccgccacatctgctctgttaacttctatattcttcatatgacactcattcagataatttaaaacagctgatttgacaccactgaagctgaaatccaacggagccccctgaatatgtgcctttgggaatgtaatggcatcgctgttgccttctttggccagcttatccaccttcgggccgccaggataccccaggccaatggctcttgcaaccttatcaaaagcttctccggctgcatcatcatgggttctgcctacgatctcatactgtccgtaatctttgacaagaacaagatgcgtatgtccaccggataccaccatacacaaaaatggtggttcaaggtctttgttctctatatagttagccgaaatatgtccctcaatatgatgcacgggcactaacggcttattcgctgcataactgatcgcctttgcttccgctacgcctacgagcagcgcaccaaccagccccggaccgtatgttaccgcaatcgcatcaatatcctccaatgtcacattggcctcatccagtgccgccgtgataaccggattgattttttcgatatgttttcttgatgcgatttcgggtacgacgccaccatataatttgtgcagttcaatctgagaatatataatattagacaacacatcacggccgttttttacaactgcagccgctgtttcatcgcatgagctttcaatcgccaaaattaaaacgtctttatccatttttatgactcctcaaaattcaattccagtgatttcttatctttgcccggataagcattctggaaaatctgacgtacatcttcaatatactgctccggtctgttcaaagccggactgtaatgcgtaagccagagttccttcactcccgcctgttttgccagtctgccggcttcttcaaatgtcatatgcttatatttgaccgcattattgacatcccctttttcgccatacataccttcacagataaaaaggtctgaacctcgggcatttctgacaatactgtctgtcgggcgggtatccgtcgtatacgttactttcagtcctttgcgtgccggtcccagaaccatctccggctgataaattctgccgtcctccgtccggatcgtttcacccttctgcaatttgctccaaagcggtatcggcacttcattctgtctggccttctccacatcaaacatacccgcacgttcaatagagatactatacccataacaggcaacacgatgattcactttgaaagcatctatcacataaccgtgcagtctgatctgctgctgcggttctgtcaattctataaatttgatttcaaaaggcagttccggtgcgatcaccctaagcgccttgacaacccgttcaagtcccttcggtccgatcattgtcagcggttccgttctatctgaattgctcatcgcaagtaaaatgccaggaagaccactgatatgatctccatgaaaatgcgtaatgcagataatatccagcggtctgaaactccaccccttttcacgaatagcgatctgagttccctcaccgcagtcaattaataaactgctgccgttataccgcagcatcaatgatgtcagccacctgtacggcagcggcatcatgcctcctgttccaagtaaacataaatccagcatattattcctctttctatttgccgtgctcctgttttcaagacttacccgtgcgtcccggtgcaaaattttcatccgttttacagacatattttctatctgtcatatccattccgtctgttcttcctcatccggcagatagcaccatgtctgaatcatcttcccatagcaattctcacagagctggaaacgatgaatacagccatcccactttgaaaagtatccccatgctttgctgacatccagaaacgctgccctgtcacattcatcaaccgacgcaatcatctgtccgcagcaattacagatatatacttcttttttacttatctcatcgtattttttcatagagtcctctcctaacctttcacatttcgacaaggtccattatacaaaaatacgtcttattcgtcaccggcaatactttccatcttcataaccaatgcattttccttcgggcaatcataaaaatccctgcggataccaatggttctaaatcccagtttttggtagcaacgatgcgccgatagattgcttggccgcacctcaaggataaaggaaacaacaccgtttttcttttcctctccaatcagggcctgcaccatttcagcaccatatccgtgattctgatgatcctttttgatagccacattgacaatttccgcttcatccagcgccctgtaagcaccgcagtaaccgataatctcattctgtgcattcacagcaacgataaaatcagcctcttcctgctcaagcgtatcccgaaaagctttttccgaccacgcatcaccaaaaaggctttgctcaatggccgccacctgaggcagatcatccaactgcatctttcttatcttcatgcttttttctgcccttttttggctgcaagttctctttcagcctgtgaaagtctgagataatccggctgatgttctgctgcagactcgtatttgccttcatgataatactgaagggccagtgcaccaagggcacctgctctctgctgactcaaatggatcggcgcatagctgtgcggaacctgaatatgttcctcaatatatggtttgaataccggtacaccgtctccaagaaagatcactttgcgtcccagctgattaatctcatctataatttccccaagcatcactgctttctgtccggagatgcacttcatctgatctccatcaaatgtatatagccccgtataagtctggtttcttctggcatccatcaacgggcacacaactgcatctgttccgcaaagattatatgcaatggcatctactgttggtacactgataatcggaatacttaacgccagtccaaggcccttggctgttgccgaaccgattcttaatcccgtaaaagaccccggacctcctgaaacggcaatagcatccatctcctgtaccggaatcccgatcattttcagcagcgtatccatcattggcagcaaagtctgcgagtgtgtcttcttaaagtttgttgtatattccccgatcagcttctcttctgtcacaactgccacggaagccactaatccggagctctccaatactaatatcttcactgtaattctccttccgcctcgattgttatcatccgataatcaaatcctttttccagtaccttttctattctcactgtctgataatgaggcggcagaatttcttcgatcagattggcccactcgatcaggcagacgccctcaccaaaaatatattcatcaaatccgatctcctccatctcttcaacgtcaccgatccggtaaacatcaaaatgataaaacggtatccgtccctcgtcatatgtctgcacaatagtaaatgtcggactgctgaccggttctgtaatgcccagtccggccgcaaagccctgggtgaaaacagtcttgccgacaccaagatcgcctaacagacagagaacatcccccgccttggcctccctgcccatctgttcacctattttatatgtttcttccgcactaaatgtttctatcttcatactctgactctcttattattattttaatttgagttttcctgtatcaatatgctgttttaaacatgctaccacacgtgcatactgttcgcccaactgatcctttggccagatataagcccgggctgctgtcatatagaccagtagttcacggccattatctttgactctgatgatctgatcccagccaacatctgcccgttcttcaccgagacatactgaaagatgttcatcggataaaatatattccagtccgccgcccagagatttgttccgctgaatctgtgcctttgcctttgtcaaaagcatcagcggattgatgaccgtaaacagcagcgcaataataaagtagagcatcttagccgtcgcatccgtcacattccatcgggtgatcagcaacacaagcgaaccaatactgagcaccagccctatgatacctgcaggcttgctgtaataatgatgcatcataaaatagtacaaatcatttacttttaatgcaattttaaatttaatctcgtccattttgcctccttgtatctaatctataatagtatcatcaatcaagaatcattgtcaactgaatacgtttttttgcaagatccacagacataactttgacttccaccacgtcaccgacactgactatttccatcgggtggcggacaaatttcttatttgtcagctgtgaaatatgcaccagaccatcctgatgaacaccgatatccacaaacacaccaaagtcaatcacgtttctgacggttccttttaaaatcatccccggcttcaggtctttcatttccaggacatccgtacggagtaccggcttcggcatatcttctcgaggatcccttcccggtcttctcaattcatgaacaatatcatgcagggtgatttctccgatggataattttgccgccatcttctcataatcttcaattcgaatcggaaggctgccttcacgcagcttatccggttccacgcccaattcagacagtaatttctcgactgcctcataggattccgggtgaacgcccgtattatcaagaggctgactgccatcgctgatacgaaggaaacctgcacactgctcataggctttcggtcccagttttggcacctttaaaagttgttttctgttgtcaaaacgtccgttttcttcacgatatgccacgatattctttgccacagtcttgctgatgccggaaatatactcaagaagagacgcagaggccgtattcagatccaccccgactttattgacacagtcttcaacggtaccagataaaacttcggacagtttcttctgattcatatcatgctgatactgaccgacaccaatggccttcggatcaatcttaaccagttcagccagaggatcctgaagtcttctggcaatagatgccgcacttcgctgacccacatcaaaattagggaattcttctgtcgccaatttgctggctgaataaacactggcgcctgcctcgctgacgatcacataagccactttctcaggtatttccttcagaaaatctactataacctgttctgattctcttgacgccgtcccgtttccaagggaaatcagcgtaataccatattccctgacaagttttcgaagaacttccttcgcctgatcaattttcttctgcggctctgtcggataaataacaaccgtatccaacaccttgcctgtcgggtccacaactgccaacttacatcctgttctgaaagccggatcccagccaagaaccgtctgccctttgattggcggctgcatcagcagctgcttcagattcttgccaaaaacagtcatagcgccttcttctgctttttcggtcagggcattccttacttcacgttccaccgctggtgcgatcagacggcgataactatcctctgctgccgcttccatcatttctgttgtataaggattcttctgatgaacaacctgtcttttcagccagccaatcagcttctcttccggcacttcaatcgttacattgaccatcttctctttctctgcacggttgatcgccagcactctgtgtcccgcaattttggataccggttcagcaaaatgataatacatttcatagacagatttttctttgtcatcctttgcttcagatacaagacgtccctctttttcaaactgctgtcggatccacatacgataagccgctgtatccgcgatactctctgccaaaatatccgaagcgccctctaaagcttccttgacatctgccacacctttttcctctgacacatagtcggcagcttcttcttcaaccggatgtccgagattctgtgccatcaccgctacggccagcttttcaaggcctttttccttagcaatcatggcccttgtgcggcgctttggacgatatggacggtataaatcatccacaaccacctgtgtctgagcttcctcgatctgtttcagcaaagcgtctgtcatcttcccctgatcacggatggtcgcaatgacctgctgcttcttatcttcaagatttctcagatagatcagccgttcataaagctttctcagcacttcatcgtttaatgcccctgtcttttcctttcggtagcgggcaataaaaggaatggtattatcctcatcaattaactgtactgcagctgtcacctgccatttttcaacacccagttcactgctcagttttgcttcaatatctatcatacttttctcctttattcattgaatacaacggggctgcagcaaaattatcctattcttgccgcagccccgatcacttttattctatatatgctagtacatcgttttcgaaataactacaccattcacttgcctgcgaatggtgtagttatttacgaaacgatgtactagttcatgaaaatacgagcgataaagccaccaagctgtgatttcttctcttcaaaatcgcccactgtcattggttctgttacaaagccatactcaccatccacaccttcggcatggcagatagcaatgtccccaaataaggctctcgctttatcttctgtgccattcttcgcacgaacaaaaaatctgctcttgtacaatgtatattcaaccagatgcagtttctgtggctgccagatcgtcatgatatgggttcccatatgcttgacttcatccaccacatcagaaacaactgcgcttgctgtcggcaacttacctgcacccttgccatagaacataacatctcccagggcattaccctttacaaggattgcattaaatacatcattcacactataaagcggatgatcatgggcgatcatcatcggtgccacaagtgcaaacagaccgccttcttctctacggcttgtgccaagcagcttaatgcccatgttcatagccttggcatacttaaagtctgtctccgtaatatgcgtgatgccttctgtatgaatatcctcataatccacctgcataccataagcaagagaagttaatattgcaatcttacggcaggcatcatagccttccacatctgcttccggatgtcgttctgcatagcccctgtcctgcgcttccttcagtacagtatcataatctgcacctgccgtatccatcttggtcagcatataattcgttgtcccattcagaatacctgtaatctcatcaatctcatctgctgtcagagactgattcagaggacggataatcggaataccaccgccgacactggcctcaaaaaggaagttaacattcttctcattggcaagtgccagtaattctgcgccatgcttcgctaccagttccttgttggaagttgatacactctttcctacctgtaaagccttcttgacaaaagtgtaagccggttcaacgccccccatgacttcgacaataatcttgatctccggatcatccaggatcacctgataatcatgcacaatcttctcctggatcggatctcccggaaaatctctcagatccaaaacatatttcacatcaatggcttcacctgcacgctttgtaattgtctcacgattcgttgtcagaacctctacaacacctgaaccgactgtcccatatcctaaaacagctatattcacaataatctcctcctgcactcagacttcgtgctctgtctattctcttccgagtatttttatgtcgtgaatgcccttcattgcattcagtctctccacaagtgcagaaaaatctcctgttgtcggcaaaacgtcgatactcaatgtcaatgacgcaacaccattgatggggattgcctgatgaatcgtcaatatattggctctgtaatctgcgatcttccccaatatccctgacagtagtcccggctcatcatccagctgtatgctgagcgtaatggtccgcccatgaacattctcatgaaaaggaatgatatcatctttgtacttataaaaagaacttctgctgatacccgtggcatctgttgcttcctgtacagtcatcgccttctcggaatcgatcagacgctttgcctccacaaccttcagtaaaacttcaggcaatgcccgttcctttacaatgtaatatttgccacttttatccataaaatccaccttttgttcgcataggaaatacacttgtttttactagaacgatagtagcacaaattatcccccattgcaactgttttattgttcctgcggctgattttttaaaagattgttccatttcaggtaggcattgataaaaagatcaatatctccatccatgaccgcatctacattgctgctctcggcacctgtacgatggtccttgaccagcttatatggctgcatcacatatgaacggatctggctgccccaggcattatccttaacctcaccgcggatacctgaaagcttctcctgattctcctgctgtttcagcaaatacagtttggctttcagcatctgcatggctttatccttattcatatgctgagatctctcattctgacattgcacaacaatattcgtcggcaaatgcgtaatacggatggccgatgacgtcttgttgatatgctgaccaccggcaccgctggaacggtacgtatcaattcgcagatcatcctcattgatctcaatatcaagatcttcctcgatatccggcataacatcgcaggacgcgaaggatgtctgacgtttacccgccgcattaaatggtgaaatacggacaagacggtgaattcccttctcactcttcatatacccataggcattctctcccgcaatttccactgttacagacttgataccggcctcttcaccatccagataatccagcacggtggttgtaaagccatgcttctcagcccatcttgtatacatgcggaacaacatgctgacccagtcgcaggcttctgtaccaccggctccggcatgcagtgtgacgatggcattgtctccatcatactcttccgaaagcagtgttttaattctgagatgttcaaaacgtttctcaaaatctgccatggcttcctgtacttccggaatcagggatgcatcattctcttcatagcccatctcaagaagtgtttccacatcttcccatgctgtctccaatcgatggtattcttcaactgtgtcttttaaattctttaattctttcatggagttattggctttgtcggcattgtcccaaaaacccggttcctccatcatacgctctaattcttcgatccttgacttcttgccagccaggtcaaagtgaatcccccacttcttttaatggtacggcatagccattcagagcgaatttaatctgatcgaattcgaccaccaaaatcacctctttctataatcagaacctgtttgcaggttctggtgcgaaatcgtgtctgcaaagcaggcacgattccaatttattactgattgcgtccgcaacagttcttatacttaatcggacgtccatccggatagcacttgccgcatgggcaaggatcattcggctgaactttcttgttctttctctgaacaggtttctttggaccggaatcatccttgttcgttcctgtcaccttcacttcctgtttgcgctccacttcaggtttcttgcggatgtgcagcataatcatcacgatatccttggaaatcgcagcaatcatctcttcaaacatctcaatacccgcataacggtattctacaacagggtccttctgtgcatatgcctgcagagaaatactctgacgtaactgatccatatcatcaatatggctcatccacttattgtcaatgactttcagcaggaatacacgctctacttcgcggaatgtctccgcagagcccgtctcctctgttatctcctgttccttctttgcatacagttccttgacctgttctgtcacttcatcgatcagacgttctctcgtatagcctttataatcatccttattcatggacagcggcttaatcggtgcgattggaagcaatgtacggttcagcaacagaagattccattctgccggtgtctgaccttcatcaataacatcattgatctccgctttaacaacatcgccaatcatacggacaatctcatcatgcatgctctcgcccttcaagacacggcggcgctcttcatagatcaattctcgctgctcattgttaacctggtcatattccaacaggttcttacgaatagcaaagttgttggactcgatcttcttctgtgccttctcaacagcattggaaagcatcttgtgttcaattgccataccatcttcatgagacagtgcattgaataccttcatcatcttgtcagaaccaaacagacgcatcagatcatcttcaagggaaatgaaaaatcttgtatcacccggatctccctgtcgtccggcacggcctcgaagctgattatcaattcgtcttgattcatgacgctctgtaccgataatcttcagaccgcccagttcagccacaccatccccaagcttgatatcggtaccacgaccggccatattcgtggcgatggtcaccgcacctctttcaccggcatgtgcaacaatctccgcttccttctcatggaacttcgcattcagaacggtatgcggaatcccctcttttctcagacggttactgatttcttcagagccttcgatggtgattgtaccaaccagaacaggctgtcccttctgatgggtctcaataatctcttcaacaatggcattgattttctctctgtgggtaccaaataccagatcatcatgatccacacggataactttcttgtttggcgggatctcgataacatccagaccatagatctcacggaactcttcctcttctgtcagggcagtaccggtcatgccggctgtcttgttgtatttattaaagaagttctgcagtgtgatcgttgccagcgtgcggctctctctcttaacttctacaccttcttttgcttcaatcgcctgatggagaccatctgaatagcgacggcccggcataatacgacctgtaaattcatcgacgatcagtacttcgccatccttaaccacatagttcttatcacggaacatcagataattggcgcgaagagccaatgtcataacatgctggatctcaaggttatcagcatcagccagattgttcagatgaaaatactcctctaccttcttgacaccctgttctgtcagaacaacatgtttctctttttcattgacaatgaaatcaccggtctcttcaacttcttcacccatcatgactgtcatcttgttgatctcgcccttacgctcaccctttgtcatacgtttggccagataatcacaggtgttgtaaagtgccgttgactttccgctctgacctgaaatgatcagcggtgttctggcttcatcgatcaatacggagtccacctcatcgatgatcgcataattcaattcacgctgtaccagctgcttctcataaactgccatattgtcacgcagataatcaaagccaagttcattgttcgtcgcataagtaatatcgcactgataagccgcacgacgctcgtccggattcatactgttcaaaatgacgccaacgctcaatccaagaaaacgatgaacttcacccatccactctgcatctcggttggccaggtagtcattgactgtaacaatgtgaacacccttgccctcaagtgcattcaaataggccggcaatgtagatactaatgtcttaccttcaccagtcttcatctcagcgatacgaccctgatgcaggatcacaccgccgatcagctgaactctgtaatggcgcatgccaagtacacgggttgctgcttctctgacaactgcataagcttccacaaggagatcatccaatgtctctccttcagacagacgcttcttaaactcatctgtcttcgctctcagttcttcatcagacaacttctccatagcaggacccatggcttcaattttatcaacgattggatatactctcttcagttctctctcactgtgtgtacccataatcttgctgaaaattcccatatagttctctcctaaaatcactgaattgtgcgccctcatatatactgtgtttcttcctgtccggcgcacccgaaacgtgtctataacgaatttattctaacactatatactgccatttgcaaataaaaaaagcgtaaaaacttccgcatccccgataataaaccacgtttggttcccggatagacacaaaaaaacctcaaaagaagttgttcaatacaggcatgttcgcactgccatcacctgtaatttgaacaactccttttgaggcttttgtcgattatatacaaccgcacactatttattccccatagtatgcttatactcaatattcaacacggatttagttctccggttcgatcagaccgtatgtgttgccttttctcttataaacaacattgacttcattggtctgtgcattgcggaatacaaagaatgaatgtccgagcagttccatctcaacacacgcttcttcaggatccaatggcttgatcgcaaacttcttcgttctgacgatcttcacttcctcatcaccatctgtctccatctcaagatacgccggttggaagttctttctgctgttctgctggttcgcaattcttgtcttgtactttctcaactgacggacgataatctcttccaccagatctatggatacatacatattatcactggactgttctgcacggattgtatgtcctttcacaggaactgttacttcaatcttctgacgctgcttctcaacgcttaacgtaacaataatctctgtctcaggtgtaaagtacttctcaagcttgcctaacttatcgtaaatggcttccttcaatccttctgtaactgtgatattgcggccgctgatgatataacgcatataaccatctccttcatctatattccactgaaatgaatcagggtctttctgtcttacaacttgtaaaactatagcattattataccatatataccgattttttcaagtcaattcattgaattttcaaaaaataaatgtattttttgactattggacgtattttatttagaattttctgtgccatttttattattatttgtcaatacaaaagtcaagtattttcgcgttttttttcctcaattcgacactttttacgttttatacaaaacatatatttgcataagtgttcaagatatccaccatttttttatccacaaacctgtggataaagtggataactctgtgtataactcaaaaatagcgccttttcagtatttttgcctgtggataacctggtgataacttttcacttgtcctcatcctctatcgggcaacttcgacatgttttggcacaattattgtgcaattctcacaattagacatttttaaattgtttcactcccgaaacaatcagaatttcatcgaaagttttccataaagcaattgctatttttccatctattcacatagcgttgtcctttgtcgaatgattgttgaaaaaccgatcaaaggaaagaaaaagaaaaactgcatgcccgcagaatactctgcaaacatacagtttttctttcgtatattgattagataatacgttttgcacacattggtgttctgtagtacagatcggaaatgataattccctttgatggtgtacttgcatgaacaaccttgccattaccgatataaataacaacatggccgacgccttcgctgtcaccatagaatacaaggtcaccaggctgaagatcactgatggctacagatgtgccaacagttgcctgaatacttgcacgtctcggaatggaataaccgaaatgcaggtaaacctgctgtgtaaatcctgaacagtcaacaccatttgtcagactgttgccgccatagacatatggataaccgacatactgtacagcgaagtctgcaatctgctggcccagtgaagagctggatgaagtagatgaagcagttgtattgcttgttacagttggcttggtcgtcgtcagataatcactcttgatgtaacctgtctgaccgttataatcaacacggctccagccgctgcttgtcttgcctgttcgtgtaatgctgccgcctgctgcaagtgtaccgatcttatccgcatctgctgatgctttggcacggatattcacacctgctgttgcataaacggtttctttcacttcttcaatatcactcttagaagaggaagtattggatgaagaagatgtctgattgctctctgttacctgaggctttgttgttgtcagataatcactcttaatgtaacctgtctgaccattgtaatccaccttactccagccattgctgtctgatgtacgtgtaatgctgtagcctgcgatcagggtaccgataacatccgcatctgctgatgccttggcacggatattcacgcctgctgttgcataaacagtttctttcgtttcctgctttgtctcagttgtctgctgtgtactgtctgatgctgcagccggtttcgttgttgtcagatattcgctcttgatgtagcctgtctgaccattgtaatccaccttgctccaaccgttgttgccaacacctgtacgtgtaatactgtagcttcctaccagcacatccagtttatctgcatctgtcgatgctgctgaacgaatagatacggaataagttgcccataccgtttcattcacatctgtataagaagcagaggattctttatcctgctgagtcttctctggctctgcggcttttgtttctgctgtttcagtttcagcagcctttgtctctgcttctgtctctttctcagtttcagcttcagtttcggacgcttcagtttcagcagcctttgtctctgcttctgtctctgccgtctcagattccttcttcgtctgctcttcatcaacagaaacagcctcttcgtatttcacatccagaacaactgaatctgccggaatgtaacctgtgttatcaccaaccttaacctgtacccactggccatcgtctgatgctccgagcactgtcagctcctgatcccacaaaacagttgtcacaatcttggcatcagctgaaggttcttcgtacatatacatctgctcactctgtgactttgccaccagttcagaaactttatgttcttctgcataggcttctgcatctgtccctgtgagcaaatactttgcttccacatagccatcacaatcaccggatgtaatatgtgcccatccgtctttgacttcctcaatctcacagcccgagccggaataaagcttacccacaacttctgcatcgccattcggttctgtatggatcttcagataatcatcagcaacagcgatacccttcttcgcatacggagaacgctgatcctgttcgacagttgtaataatccttgcttccagatccaggcctcctacataggtactgtcggtgctgacaacagatatactctgatctgtattgatcgtaatcggtgctgccatcgccggcactgtacatgcagaaacaacaagagctgtggtaatacctaacacagctctcttatatctatgattcaccatcggtataccccttttctatcttttactttgttcctatcccataattatgtaaatgcaattacaagatattaataaacaattgtaagttgttacattattgttacaaaaagattataccaatgatacgcttttttgtcaacctatccgtctgatttttccaccctgaatcatgatcttctgctgtttcagcagtcgtcccacagcacgtttgaaggctgctttactgattccgagctcacgctcaataacttccggactggctttttctgtaaaaggcaatacaccgtcatagctgtccagcagtctgaggatcttctctccgtccttgtccatctgcacactgactgtctctgacatcgtcagttccatcttgccgtcttctctgactttaacaactctggcatgtacccgatctccgactttcatacggccatgaacaccctttgatgggatcatgccatgatacgtgccgtctacggcaacaaaagcaccataatgttcattgatctgataaacaatcccctcaacgtaatcatttttctgataatcactgtctgttcgcagatattcataaaccttcatcgttgcacagagacggcggctcttatctatataaagtgccaccagacagctctgaccgctctccggacgccatgtctgctctttaaaaggcagaaaaagatccttttccaatccccagtccagaaatgcaccaatcttgcccacctctttgacttccagtatcgctgtttctcccagtttcagctttggctccaatgttgtggccaccagtctgtcctgagaatcacgataaataaatacttcaatctcatcaccgatctggctgccttccggcacatatttggacggtaataaaacagcctgctcttcgccttcacagccaagatatacaccaaatgttttcacacgcttgattgttaaaacctgtttctttcctaattcgatcattttttcctcccctatctatcttttgaactcaacaaccgcgtaggcctgaccttctgcatctccaagcagaatcttgatgatttgatcatccttatatataaaaggatacaactggtcatgcaatactgccgctttcttatattctacacgtacctggcgaatatgaaaatcctccggtacaaattccaatgccgttcttatatactgtgcattattcatgtgctgattcgtgtcaataaacgcttttggaacactgatcggttccagcctttccttttcttctctgaaagcaatcttacgcggtgcatacgacatgtccgcttgctcttccataggataatgtgccgcaatctccggtgcgattcttacaacgtgtccgttttccatatccacaagtatccactgcgaattggcaacagcgagacgtctgccgttctcgtcctgaagcataaagtttctgtaaccgaaagctgcatcgaatttgtatggccatgtgctgacactgactttgcatcccatctccggatatgtgtccacatcaatctgccatgaagccagcagccaggccagatgatgctcattcatgtaggtaagccccatgccaagcacttccgactggaaaacgctgcaatcctgaaagtattcagcaatctgagcaatatctgcaaaacctttcatggaaatctcactataagtaactcttcgatcatgtgtatacatcctccgtctcctctctctgcctgtcgcaggataaaaaaaacagacatcttgcctcagcaagatgtctgacctaatagctgggctagaaggactcgaaccttcaaatgcaggagtcagaatcctgtgccttgccaatttggcgatagcccaatgtctcttgacaaaaagaattatataacaggaaatcaaaaacgtcaagcactttttttaaattttttaaacttttttatttatatctacaaaataccaaattccaccatctgccggaagatcgaggacggcgaaacatccttggtctttgagagcaacgatccacagttaatcatgtcaggcccgttttcactgcctagtgctggcagcggtacataaggtgttaaaaaacaacacctaagtaccggccgcaccagaagcacctgacatgattaactgtggatcgttgttctttcgaagttttcgatgtttcgccatgaacgcctcccggcagatattccatccagataagcgctccacttcagaaggcatatctgctttacaggattaactcacttacaccttcgcctttctatacacagatcattgcgagctggcaataaccttttgaaaaaacatcaaagagcacccattcatggcaggtgcttccgtcacggccggtacttaagtggtgtccttcaccactttatgtaccgctgcctgtgacggtgcagcgcgagtgtgcctgccatgaacgggtgctctttgatgtttttctatatactaaagacagtttgcaatgatgtccgtatgatcagtattccacttcctgaaggaacaatccctgtgccgccgcagttgctccggcttttgttctgtccctgctctctaaaatagctgtcatttcttccggccggcgctctccttttccgacttcaattagggtgcccacaatgattcttaccatattatataagaaaccattgccataaactgtaatctgcagttctctcgtatcagcataaatatcaatatcataaatctcacgaacagtggatttgtttgtacgcttgttggaacagaaagctttgaaatcatgttctccaacaagaagggctgccgcctttttcattgcagtcacatccagcttatcgaaacagtaccaggtatactttctgtcaaaaacacagggaacatcgccaatggcaatacgatagagatatttcttagctttggcattgtacctgctgtggaaacgttccggcacatcgtccacacgattgaccgcaatatccccaggaagatatcgattcagataatacttcatctcccagcatttcatattgctgttggtatggaaattcgccacctgctcataagcatggacgccggcatctgttcttcctgctccgatcaattctacctgttctcctgtcatcttgctgagaacatcttccagttttccctggatgctcacgccatgacctttgccaaggcgctgccatccatcatatctgctgccatcatattcaatcagcagccgtatatttctctccatatgctatcctttcacatctcacaaggtgcggatgccccggtgtaccgatatctgtcaatgtcggcacctccctcaggcaattctcacctgcatagcgacagcggccgtaaaacggacatccgccgtctccatccactgtttccggtaatatttcattcactgtgacgctatctgtcgtttctttctcttcatctgtcagaatactgtcaaacagcattcttgtatacggatgacatggatgatcataaagttcatccacatctgccatctccacaattcttccaagatacatcacgatcactctgtgacacatatgatgcacaacattcaaatcgtgggaaataaacatatacgtcagatttttctcatcatgcaacttcagaagcaacctgagaatctgtgactgaaccgtaacatcaagggcggataccggctcatcagcgatgatcaatttttccccgcgcatcagcgacaggccgatactgattctctgtctctgaccacctgaaagctccctggcataacgattcgcaaaagatggatccaggccaatctctgtcagcatctgattcaccaactctttacgctgtttcttatccttaatgcctttcagcttcagtggttcctcaaggatccaaccaatcttcctggcaggattcagggaactaaaaggatcctgaaagaccatctgcggtttcagatgatccatctcaagcttaccgtcatactctctattcagtccgacaatggtcttcgccaatgtggacttgccacagccgctttcacctacaacgccgagaatctcaccctcataaagatcaaaactcatatcatggataatatgcttgcgtttatccttacttgaaaacagcttcttattctctttataataaacattcaaatcctgaacttccagcagcttctttgtattctgggatttccgtacctgatccggcatagacgctacaagcttgcgggtatactcatgctttggatgcttcagtacctctttggcatccccgcgctctacgatcacccctttgtacatgacaaccaccttctgacagacttccttgatgacgtttaagtcatgggaaataaacagaatagaactgcccatatctctgtggattttcttcaacagattcagaatctgagcctgtacagttacgtcaagggccgtcgtcggttcatccgcaatgatcagatccggatggttgataatcgccatggcaatcatcacacgctgacgcataccgccggaaatttcatgaggatactgatccaccagtaattccggatttctgaggccgacactggccagtgcttcgatcacacgtccgcgaatcgcttctttatctaaatctgtatgcagtttcaggctttctcccacctgagtaccaatcttcatgaccggattcagagatgtcatcggttcctgaaaaaccatcgacatattcttgccctggatcttgcggcgctcctcacggctcatgcccaaaagttcctgaccattcagctgaatggagccctcagatacctgcgcttcttcactaagcagtcccatcactgcaagagatgtcatggacttaccggaaccggattcaccaacgattccgacgatttctccttttcccacctcaagattgacatgatccacaactgtgtgtatgccactctttgttggaaaaccaatggtcaaattctcgatttttaataattccttatccataggttcctcctaatcgctgatggccctcagcccttcactgatctgactgaagccgagaataataagaacaatgacaacacccggccaaatggcataccacggtgctgtaaatatataggcctgtgcctccgaaagcatacgtccgagacttggatccggcggctgaacacccagtccgagataactcatacttgcctccgccagaacagcattgttaaaaccgatcgccgctgctgtcagcatgcttacaacggtattcggcaaaatatgtacaaatataattctcagactgcccgctcccatcacctgggcactgcggacaaattcctgggacttgtatcgtatcacttcgcttcgcacaattcgcgcaaaactcgggataaacatcacacccaaggccacgatgatcttgtacttgccggttccgataaaactgataaagatcaaaacaagcaggacgctcgggaatgataataaaacatcattgattcgcataacaatctcatccagaagacccccgtaaaatccggtgagtgcaccgatgataacgccaaaaaaacatccaatgacaactgtggacaatgccacaaaaaatgtcgtgccgcagccattcatgacacggctgaaaacatctcttccgaagttatctgttcccataatatgcatcaggcttggtgcctgattcctggccatgctgttcatgcctgtaatatcatacggcatccagaactggccgataatcgttatgacgaggataatgcctgtcaggatcagaccgaaaatcagactgtaattatgtttcttcatcttctactctcctacgctgtccgtactctcgggtctgccagctggtataaaatatccacaagaaaattgatgatcacaacaatggatgtaatatataataccgctgcctgaacaaccggataatcacgggttgatatcgatgtgatcatcagacgacccatacccggaatgctgaaaacctgctcaatgacaagacttccggcaagaatttctgctacaaccatcgctacaaatgtaataacaggtatcaacgcattacgaagaacatggccatataaaacctgattgacggaattgcctttgctgtaagccgttctgacataatctttcttcatttcgcttaatacggaatttcgaagatacttcacaaccatcgcaatctttggaagcgctaccgcaacagccggaaggatcaggtactcgatgcatcctttcaggtcctcctgcatactgacataacctcctggctgaaacaccttaagcaccagaccaaaaataaccgtcaggataattcccagaaagaaagacggaatcgccattgtgatctgcgtcacctgattgatcactacatccagccatttgccggcatagcgtgctgacagcatgcccagaggcagtgatacaacaatgataatgataaacgacatcacagccaacagaattgtgaccggcagtcgggactgcagaagctgtgtcactgtcattgtatcgtatttgtatgattgaccaaaatcgccatgtaatgccttaccaagccaatgcacatagcgggttaaaacaggctgatccaactcatactctgctctgacccttgcaatagcttcgggagatgcatccactcccagtttggaaacggcggcatctcccggtatgacactaaaagcggtaaaggtcagaagtgaaataaataacaatgttataatgagagtaatgattttttttataaaatatttcattatgacctccgcgacaggttccgcttatagaaacctgatcgatgtgctctatttaatttctattgatgattcagattactgaaccggtttgacaagtgaaaggtcaattgcggaaaccggatagctctggtaacctgtatacttgttgctgactgcaataaagtcagccggatcttcgataaatacagatgctgcctgatctgtaagaatctgctgaagttcaccatacagctgatgcttctcatcatgatcaatagttgccagtgctttgccgtatacttcatcatatgatgcatcgctgaagtttgtaaagtcattgctggaatcagtgtaatatctcttataccatgtagccggggaaagagagctgatatcaaagccgatgactgtagactgataatctctgccctggtaaacatctgatacccatgaactccattcaacctggttgatagttacattcacgcctacagctgccagctgttctgcaatgatctctgcagtctgaacatgctgtgtataactgctaggtacagtgatctcaagatcaaaaccatctgcataacctgcttcagcaaggagttctttggctttatctacatcatatgtataagtgccttctgtatctgcattgtaccatgctgtgatagtcggataaccatgtgtctggataatcttgctctttccgccgaacaggaattcattgatggcatctctgtcaactgcatagttcagtgcctgtctgacacgaacatccttcagtggctcataagcgttattcaggaaaagaccgtgaaccagcatcattgtagactctacaatattgtaattctcagttccaagtgccgctacttgatcatttgtcagatactgaagcatatcaatggtaccgccctgaagttccacaaaagcggactgagcatctgcaatgaatttgaacttggcatgctggatgcagtcaagttctttgttccagtaaccatcatatctctccatctcaagatactgaccttctgcaaagttcgtgatcttgaaaggacctgtaccgattggattggttgcctgattcgcatcgttagcctgttcaaggattgcaacagacaggttgtagataaactctgaatttgcttctgacaatgtcagttcaatggtcttgtcatccacaatattgatcgctgaaatagcagaaagtgcggaagactcgccgtccatttccgcacttctctctaatgaatatttaatatcttcgactgttacagggttgccatcctggaaagtaattccatctcgtaatgtgaaagtatatgtctttgcatcatcagagattgtgtaatcacttgccactgccggagtgacatcaccatctgtagtaggttttaccaaaccttcaaaaacgttaaataagacactgcgagttcctgcatccgaatcttcgtgcgggtcaagactgctgatttcctgtgacagacctactgtgaaacaggaagtatctgaattggctgcgtcagactgtgtgccatctgctgctgattcagttgtcttttctgaagaactattaccagtttcagaagactctgtactcttattgcttccgcatgcgcagaatgcaacagataccaaaagcaccattacacttaaaagaatctttgtgacagatttctttttcataatcgtttaaacctcttttttctgtaatatttctcccattattaaattgtctatcacattataccatttcagatataaaaagcaagtattttttattgaaattgacagttattcaaccgatttcaaagattcaaccatgtctatttttttcagtcggtagtacatcagccagttgacaaaaatcgagaagccgaatgtaataataatcgcataaatatagctcgaaaagtccgcacgacggataaacatgagcacctctgtctcgacggaagtaataatatacgcatgcagatacttgccgaataccgcccccacaagggcaccaataatcgtcagcagtatattctctctgtatacatattctgccacttccagatcataaaatccaagcactttaatcgttgccagttccctgcgtcgttctgtaatattgatattattcagattgtacaatacgataaatgccagcataccggcggcagtcatcagaatcagcgtcacaatgttcagactgttcagtacttcctcaaacttgcttcggacataatcagtggtggatgttcctgatactgcattcaatgccagcaattttgccgaataggattcggaattttcactggtcagtccaggaatgaaagcttctatcttattccatttcggcgtctcaccgaatgttgtctcatataatgccggtgacatatacacataactcatgagataattctccgcaatatgtcccaccgtaacttccttatccacatcattgtctgtaacagtaatcttatctcccgtactcaccctgagaagattggccagcttctccgtgataatcaccgtttcatcatccatcgcatatggcgtccctgtttttctgtcctgaagcaccacaaaatctttgtaaacttctgtatcctcaggcaccgtcagataagctgtatacgaagtctctccattgcccttgacactcatactcatggaacgcagtctggtatactgatccgcctttagatcattgttatgacttaaaaaatcatacaattcatccatatccgcctcatccgcattgtcatccagtgtcagtgtcatgtcatagtggaacagctcatcatactgtctgtgtgcaaccccgctgatagagtctgtcagtccaaaagcaaagaccacaagagctgtacagccgccgatgccaaatatagtcataaagaaacgtttcttgtaacggaaaagatttctcacggcaaccttggacgtgaatttcatatgatgccagataaatcccacatgttccaacaaaatctttcgtcctgctgccggtgctgaagggcgcatcaattccgccggtgatgccaccagttctctgtaacaggacgccagcgccgcaccagtcacgcaaataacagctgcaccggatgccatgatagaataataagcattcagcggtgtcagtaccacaaacaaattcggatagagtacacggtaagcagcaatgataacccatggcagcaatttctgccccaaaaccaatccgatcaggcttccgatgagactggccgataaagcataaaaaacatattttctggcaatggcccaattgctgtaccccaaagcttttagtgtaccgatttctgttctctgtgactcaaccattcgtgtcatagttgtcagactcacaagcgccgctaccaggaagaaaatcaacggaaaaatcttgccgatagcaccgattctctctgcattctgctcatattccacatacgcctgtgtcgaatttctgtccagaacataccattccggatagtctacatctgccagctgatcctctgcatcctgaatttctttctccgcgtcagcaatcttctcctgtgcttcctttttgccggacgcatacttctctttggcatctgcaagttccgactttgcatccgtaagcttctgctctgcttctgcaaactgtgcttctgccgaagccatctgagacttcagttcagccttacccttatcaatctctgcctgtccgctttgcagctgcgctttcgcctgatccagggcagccttaccgctgtctaattcctgttgtttgctctccagctgctgcctgcctgattccaactgactgctgccctcatccagctgtatcttagcctctgtcaattgattaaaagtctcatccagcttggcctgctgactgttcaattctttctgctgttcgttcaattcttccttcccggatgcaatctggcttaatcctgcctctatctggtcaagtccgccatctacctgggaaataccttctgccagcgcattcttctgcgcatccagctgggttaactgctcctgaacagctgtaatctgggcatccagctgtgcgatcagagcttcatccggctcctcctgggacgcagcctcattccgctgttcttccaacgcctcctcctgggcttcaagctgggcgatgccctgttccagctctgtctgctgtgccgtcaaattctccttctgttcctgcagcgaagccttctgttcatttaatgctgcttcctgactttgcagtgtttccaacgcttccgtcaacttggcctgaccggctgtcagctgttcctgaccggcattggctgcctgcaatcccgcttcgtactgctgcttcttctccgccaatgtctgtgaagaatcctccaattgctgtctggctgccgtgatctgtgtctgcccgtcctgaagcttctgctcattagacgtgatttcagcctgaccatcctgaagttcctgctcccccgaagaaagcttcgcctttgcagcggcaatctgatcttcatagacagctctattgtcatccagttccttctgtccgtcactgatctgctgttctccatcctgaatctgtgcccaggcctcatcaagctctgattccgcttctgctttggcatctgccagtttgtcacgggcatcatctatctctgtattggcatcatccataatcccgttatatctggctgactcacgctcactgctgatggcttccagctttgccttcaccttgtcaaccacggcttcataatcatctgaataggcctgttttgcagccgcaccatccaccgtaatgtaaactgcgctgtagatatcactcttaaaaacctccggtgacaggaaaacaaaagcatccgtctgaccggttccgactgatgttgtatctctggtcgttgtaaaatactccgggcttgccgccacacccacgattgtaaatgtcgattccgtcaatgtgtctgacaatttttcacctttgcccggaggcacaaccgtgatctgatcgccgatatgatatccgtccttctcaatcagaagatggtccacaacgcactcattggcattctcaatatcccttccttctgttatctccagtttattcactgaaaccggttcagacaaaaagcgtaatgtccatttctcattgccattcatcacaaaagcatcatagctatgtgcgccatccacttcctttacgccatccacttctgcaattgccgtcagatcctccccagtcagtcccaatgtggacagtacccgaagatccatataatcggcctcatccagatagtgatccagtgtcaatttcatatccgggcaggtggccctgatacctgccagaaaagcaacacccaatgctacaatcagaagaatggacacatatctattgagtgtatactttatctctctgaaaaaatctttgtttattgcatttctcatagatgctctcctaccattcaatagtctctaccggacgcggatccggattcaccgtcatctcactgactcttccgttcttaatctggatcaccctgtccgccatcggcgcaatggccaggttatgggtaataacgatcaccgtcataccatgcttatgacaggtatcctgcagcaatttcaaaattgccttaccggtctgataatccaaggcaccggtgggttcatcacataagagcagcttcggattcttggcaagagcacgtgcgatcgctaccctttgctgttcaccccctgagagctgtgaggggaaattatacatacggtcttccaggcccacatccttcagaacctctttcgcatccatgggatgcttgctgatctgcaatgccagttccacattctccagggcgttcagattctggatcaggttataaaactgaaaaacaaaaccaatgtcatcccggcggtactttgtcagctgtctgctgttataaaggctgatatcccgtccgtccacaatgaccttgcctgatgtcacgcggtccataccgcccagcatattaagtaccgtcgttttgccggcaccgctcggtcccacgatcactgcaaattcgcctttatgtatctctatatcaacgccatccacggcatgaatcatcacttcacccattttgtaagtcttcttcacattctccatgactacaaattccgacattttttctcctcctgttcaggtatatctcttatctttcattataacaaaaatatatcctgaattcagtgaagattttataaacttttcatagcattgcttttaaaaaatataaaagttataatacttattgaagaaaatttttacggaggtttatttatggctgaacaaacaacacatactcttcctttgcgtgaggaagtccctgccaaggataaatggcatatagaagatattttttccaacgatgacacatttacatctgcacttgaagcatgccggacacatatcgacgcactggctgccttcaaagatcatcttggtgattcggctgaaacgctctgcacttatctgacggaaaaggagaaagtactggtggaacttgacagtctctactgctatgcaggacaccgttccgatgaggacacatccaatccgcattatcaggatcttcgtggtcaggtcgattttacaggcaaccatttttatgagacaaccgctttcgaggatcctgaactgctttcccttccggaagattttataccggaagccttaaagaactactctgagctgataccttttacccattatcttgaaaacacactgcgtatgaaatcccatacgctttcaaaagaggaagaggccctcatgtccctgactatggacctggacagcaccccgcagtccattttttatatgttcaacaatgcggatatccgatttgaaagtatcacagatcgtcagggcaatgaaatcggcatctcccacggacgtttcgttcctctccttgaaagttctgacagggatcttcgccgcaaagttttccagtcctactaccgttcctttgaccagtataaaaacaccgtggctgccatttttgctgccaatctgaaaaaagaactgttctatacaaaagccagacattatgcctcctccatggaagcacatctgtctcagaacaatattccgacagctgtttatgaccagctgatcgaagcggttcatgatgcccttcctgaaatgtaccgctatgtccgtcttcgccgcaaaatgcttggcgtagaggaactgcatatgtatgatgtctatacgcctcttgtatccggtgaacatgcatccattccttttgacgaagccatggagattgtcagccgcggactggcaccccttggtgaatcttacattcaactgctgaatgaaggcatgcacggcggctggattgaccgctatgagaacaaaggcaaacgcaccggtgcttattccggcggtgattatgcccaccatccttttgtcctgatgaattaccagggcacattggacaatgtctttacactggctcatgagatgggacattctcttcattcatggtatgccaatcacactcaccactatgtggatgccagctacagcatttttgtcgctgaaattgcctccacctgcaatgaagcactgctcatgcatgatctgcttgaaagatgcagtgatcctcacgaaaagctctggcttttgaatcattaccttgatatgttcaaaggtacgctgttccgccagaccatgtttgcggaatttgaaaaaattacccatgaaaagaccgcagcaggtgaaacattaaatgcccagtccctgtgtcagatttatggagatctgaacaccctttatttcgggcctgatatggtaaacgatcccgagatttcactggaatgggccagaattcctcatttttatatgcctttctatgtctatcagtatgccactggtttttccgcagccattgccctcagtcaccgcattctgacagacggtgcaccagcagtcagagattatattgatttcttaaaagccggcggttccgactatccgatcaatgtcctgaaaaaagccggcgtagatatgaccaccaaagcacctgttgccagcgccctctctgttttctcatccgtgctggatgaaacagagtctgtcatcacatctctcggtctttaaatacgcggctttgcaggctcaagcactgtaaatatgaaaaatcccccggacgatctgaaattactttcagaccaccaggggatttttcgcgaagtgggttaaactaaataaataggattaagctttttcaacgatgagcgcctgaccctggccaccgccaatacacagtgtggcaaggcctttctttgcgtccgctctcttctgcatttcgtataataatgtaacaaggattctggcaccagatgcaccaatcggatgtccgagggcaatggcaccaccattgacattcactttgttcatatcaaatttcaattcctgagcaactgccagagactgggctgcaaacgcttcatttgcttcgatcagatcaatatcatcgatggtaagatctgcttttgtcatagctttcttaacagcaggcaccggaccaacacccatgatagatggatcgacaccgcctgttgcataggaaacgatggttgccattggtttcaggccaagttcttctgctttttcctggctcatcacaacaaatgctgcagcactgtcgttgataccggaagcattcgctgctgtaactgtaccgccgtcttttttgaaggccggttttaatttggcaactttttcaagtgttgtgccaaatttaggatattcatctgtatcaaagactgtatcacctttcttaccgtgaatcacaacaggaacaatttcatctttgaacttgccgcccttaacagctgcttctgctttgctctgagaagccactgcaaattcatcctgcatttctcttgtgataccatatttctctgcaacattttcagcagtgatacccatatgatactgattgaaagcatcccacagtccatcattgaccataacatcaacgatcttgttattgttcatccttgcaccccaacgtgccgttggaatggcatatggcgctgcactcatgttttctgtaccgccgcagacaacgatttcagattcgcctgcaaggatctggttggctgccatggccacactcttcagacctgagccgcacacgatattgattgtcacagctgttgtctcgattggaagccccgcctttaaagttacctgacgggcaacattctgtccgagaccagcctgcaatacattaccaaaaataacttcatccacctgttccggtttgatgcctgctcttgaaacagcttcttttacaacaagtgcgccaagctctgctgcaggaacatcctttaaagtacccccaaatgcaccgattgctgttctgcaagcgctgacaataactacttttttcataattcctttttcctttctcacaccataaagttcttgttttttgtttctgcctatattaatagcaaatcccgttccaattcatattcaaagacgaatccgcctgatttcaggcctttttgacgtaattttgcccttttttgatcctttttctggatgaatattcacgtacggaaccgcacggcctgcatgatgcgcgcacatgtgttgcctaattgtcacacatgtgttgcatttctgtcacacctgatgtatcataaaatcagtaaaactgtcacatgttcatgaactttcttttgcattttgaatggaaactaaggagatttattatgaattttacacctttatggacagctgcccttaatgccttttccaattttatcattgtagatgaacattgccgcattgcctacatgaataaaccctacacagaaattttgaatgtacagttagaggacgtcattggcaaaccgatcaaaagtgtgattccgaccacgaaacttccggaagtaatggcctcggaaaaagcacatatcggtgccttaatgactctttatgatcacaaaactggcaaagatatcagttttgtctgcaaccgtatccctttgatcgaagatggggaagtcattggcggtgttgccatctccacatttaatgaagttggggagatctacaatctctactcagaagttgaaaaaatgcagcagcagaatgagctgtatcagcagacgattgaacagctgcgcaaacagaccaatccactggattatatcatcggtacttcgcaggctatccagcagatcaagtccaccattgccatcttcgccaattccggattatccattcttcttaccggagaaaccggcgttggaaaggaagtattcgccaacgcactgcatcagctcagcagccggagcaccagtaactttgtcaagatcaactgtgcggctattccaaaggatcttcttgaatccgagcttttcggctacgaaggcggcgcttttaccggtgccaaaaagggcggcaaaatcggcaaattcgaactggctgacggcggcacactgctgttagatgaaatcggtgagatgccgcttccgctgcagtcaaagcttttacgtgtacttcaggaaaaggaagtcgaacgcatcggcggtgtcacccccatcaaagtggatgtccgcctcatctgcagcacgaaccagaatctgacgcagctgattcaggacggacgtttccgtgccgatctttattatcgtattaataccattgaactggctatcccgcccctccgtgaccgtctcgatgacattcccgacctctgtaatttttttgttcagaagttcaatcgtgaaaacggcagctatacacaaggcgtcgaacaggaagtgctggctctgatgcagcaatacacctggccgggcaatgtccgtgaactggaacatgtcattgaacgcctgtgctttttaaatcctcacagtaccatcggcattgcctcctgtgattttctgatgaacaaactgtccggtgaccatacattatcacggcctgccgccgcgttttcttcccttcaggaacagcgcagcagcgcagaaatcgatctgatccgccagacccttcgccaaacagacggcaataaggcaaaagcagccagaattctcggtattgatcgcactgtactttaccgtaaacttaagaaatatcatattgattaaccccaaaaacgggggaaggccttatcttacgataaggccttattagggaaatagaatgtatttacaataacctcaaaacatacaaaatgtctcaaagctaaagccaatttgaatatacagtctgcggactgtatgcttaaatcgcatctgcaccgcgttcgccggtacggatacgaacaacatcttcgatgttgtaaatgaaaatcttaccatcaccataattgccggtgctgatctctttgacaactctgtccacaatcttctctgctgcgtcatctgcaacaacagtttcgacttttacctttggcagaaggttgacattatacgttgtacctctgtacatacgtgtataacctttctgattaccataacccataatgtttgtgatcatcaggccgctggcttcgcagtcatccagaatatttttcaaactttccagtttttccggtttgataataatctctaatttcttcatcacataacctcctcattcatccaatcaggcagctatttggcgcctgcactttacacaactaaagtgtgatggtaataaaaaaacggtgctcctctaaaaaggaacaccgttgttctcaaatatgtctctattatacccctgaaatatgaaatgtcaatcatttttttccaaattccagaaatttttaataatagtacaatcctgtatggtccaaaaccgtataattatttattgctgagatattcatcaatacctttcgctgctgccttgccggcacccatcgccaggataaccgttgcagcacctgttacagcatcaccgccggcataaacaccttccttggttgttgcgccgttattctcatctgcgatgatacactgccatttattcacatccagaccctttgtcgtagaagaaatcagagggtttggtgatgtaccaagggccatgataactgtatctacatccaggtcatactctgaaccaggcacttctacaggtcttcttctgccggattcatccggttcaccaagttccatcttgatgacacgaaggcccttcacccagccattctcatccacaaggatttccttcgggttgcgaagcagatggaactggattccctcttcctttgcatgatgcacttcttccacacgggcaggaagctctttctcacttcttctgtagacaatataagtctctgcgccaagacgaagagctgttctggctgcatccatagcaacgttaccgccaccgataacagcaactttcttgccctgatggatcggtgtatcataatcatctctgaaagctttcatcaggttgtttcgtgtcaggaactcattggcagagaaaacgccgttcgcctgctcaccagggatacccatgaacttcggaagaccggcacctgaaccaatgaagactgcatcataaccctcttcattgatcagttcatcaatggtaatggatttaccgatgatcacattcgtctcaatttcgacgcccaatttcttcacgttttctacttcatgagctacaactgtctgctttggcagacggaactcaggaataccataaacaagcacgccgccggcttcatgaagggcttcaaagatcttcacgtcataacccatcttggccagatcaccggcacatgtcagtcctgcaggaccggaaccgataacagcaaccttcttgcctttcttctccttggcaggaataggtgcaatattgttctctcttgcccaatctgctgtaaagcgctcaagcttaccgatggagacaggctcacccttgataccgaggatgcacttgccttcacactgggattcctgagggcatacacggccgcatactgcaggcagcgctgaagattcgccgatcacctgagatgctttctcaaaattgccttcctttacttctgcgataaatgcagggatattgatattgacaggacatcctgtgatacatcttgcattcttacagttcagacatctggaagcttcttccattgcctcttccttgttgtaaccaagacatacttcttcaaaattcttcgcacgtacttccggtgcctgttcacgtacaggtactctgttcttcttatctgccattatctgtcacctccgcaattgccacatccgccatggtgtgtacttccttcctgcagtttcagcattgctctgccttcctgggtcttatagctctgctgacgctgcatagcctgatcaaaatctacaagatggccgtcaaattcaggtccgtctacacaggcaaacttcaccttgccgtccacaagcagacgacaggcaccgcacataccggtaccgtctaccatgatcgggttcatgctgacaattgtaggaatctcaagtttctttgtcagcagacatacgaatttcatcatgatcatcgggccgatggcaacgcagaaatcatactttgtgccctttgcagacagttcttcgatcactgctgtaaccataccgtgacgtccgtaagaaccatcatccgttgtcacatataaattgccggcaacagcttccatttccttctcgaggatcagaagttccttgttcttggcaccaacgataacatctgctgccacaccatgctcatgcagccacttaacctgagggtaaacaggtgctgtacccacaccaccggctacaaataaaatcttcttctgcttcagttcttcaatatcgtcctcaatccattcggatgccttgccaagagggcctgttacatcctggaagaaatcaccctcgcggagccaggacatcttctccgtagatgcaccaactgtctggaaaacaattgtgactgtgcctttctctctgttataatcacagatggtcaacgggattctctcgccaacctcatccatcttgacaatcaggaactgtccaggctggcatgcgcgtgccacacgcggtgcttcaatttccatcagaaaaatcttatctgcaagtttttctgcttttacaatttgatacattccatatcctcctataatgattttgtctccctattacttatgggctctattatactcacttttcgacaaaattgcaaccatatgtcctaaatatttttgttaaaaacacgaaaaatctaaaaaagtttttgtgaatttcggttgcttcgccaaagaaatttcccttgtatgctgaatcatacgccgaatgccttcctgatccgggctttggatatacacgcacaaacctgcaataaccgcattgcctaatatatgcacccgttccgccagtttctccggtatgagtcctgccccggccgctttggcaatatccagctgactgccaaaaccaccggccagctccagcgcttcaatttcttccatccggtacccggcattctcaaccagtatctcaagtccggcgcggatagccgctctggctttctggtactctctgatatccgcctgggtaatgacaatctttccaggaatgatctccagtcctctggatgcataacgaagacttaatcttcctgtattatccatcatccggctctttctcatctccgaaatagctgacacaagaccactgccgcagatacccaccggcggctttctgccgatggtttcataccgaaccaggccatactgtatccgcacatcccgcacagccccaggaatactgcctgtaccacaagataactgcccgccctcaaaggccggtcctgccgctgcagagctgacaagcatcccctctttattgccgacggccatttctgcattggttccaaggtccagaaacagatgcggcttttcatttctattcatcccgcatccccacaaaccggcggtgatatctgccccgacaaaggccgaaatacctgctagcaacgtgacctttgtctgtttcagcagacagttttccaccagtggactttcccccagcagctctgctgtggataactcttcaaaatccaggtttaccggttgaaaaggccatgccgaaagccctctgcagtcatagcctcttaataaatgcagcattgttgtgttgcctgcgatcacaatctgttcaatcggtgcatccgccgacttcaaaagactgacaataccttccgccagatcctgccggatcaatgcctgcatcgcctgctcctgtccatcctccacagccgctttgattcttgccatcacatctgtaccataacttctctgatggttcagtccccggtattctgtgacaatctttccgctgtcagtatgcaccagcgccatcacaagggttgtggaaccgatatccacagcaatgcttaacgacactttgtcaggcatccggctgtccttatctgactttacaccatacgcctccgctgtattctgccgctgaattggttccctcactaacgactcggcatgctgaaccgacggcacataaaagccgtcttcccgctgtatttcctcaaaggtgatcgcgcatgatgccgtgatcacagcccggcatcccagacgatatccagcctttaattcatcctcgctgaaaaactgcctgtcttccgtcgttataggtaaactcccctccgttatccggattctgcattttccgcaggtgccccttccgccgcaatataacggaaaataaatcttctctcttcttaatatagaaagaaaaggttccggagctgccagtgaaatggtttgaccgtttatttttatttgcatactcaggcctccatttctacaacgacttctctttcctgctgtcttgatctccgtcgtcttttccgcctccggttttatgtccggcgtcttcctcttttctgttgttgtatttctggatggtcaccagacccttcttcctgtccaggaagcgatcttcctcactgaacacacagccgcagtatttctgcatatacagccccatggctctggctttttcctgtccttccttaaagtacggacgaaagtctctgtacaaaaatgttacatgatattttttcgccattgcctgtgctgtcttaataatcagttcatggttctgatagggactgatgagcagcgttgttgaaaagctgtcatagccgttttccgccgcaaaacgggctgtttcttccaaacgacacaaataacaataaccgcagcggctttcataatgcggatacacatgatcgataaaattgcgcagcccatactcattcttgacaatcagacgcaaatgaatatccgcggcatacttcgtcaatgtattctttctggctttgtattctgtcaccggatgaatgttcggattgtaccagaatcccgtaggctcgatgccttccgctctcagtgtctcgatacacatcaccgaacagggtgcacagcaaatatgcaataatagtctcatttcctgcctcctgttcctatttgttctcgatgaatccgatttctttgatcaaaatagacatcttcccgtcatcattctgatgatactccaatatactctcatccttcagcaattccaaaggcaccagaagctcaataccgctgtctgttaccagtttctgcttcttgccaagtttacgctctgtcttcttgctgacataaaccggtatctttggaatctgctgctgttcagccacttcctgataaaggaccgccgcctgctcattatccttaaaaacagcctcctcaagttccggtacaatgatctgccccttctctttgacctgatcgaccacaatcgtcttatattccataatcttctgcggcgcctgttcttcataacagtgcttgatggtttctacaacagaatcatcaatcgccttcaccgttactgcctcagaaggtttaaaatccagtttcaatacctgatccgccagatagttctgcttcaatccgtcaatatagcactcaaaatccgatacctgcgcctgattatcatttaaattcagatagaaatattcattcactttcggagacggtcccggcaaaatcatatgattcagtgtccagtgcactgcactgttctcatcctgtgacaccaaaaatctggattgataattactcttaaaaaatgtaatataatcctgatcttccaacgtcacccatgcaaacatacctgcccctgtctggatttccgggttcgcatgcatcagatcctgaatctcatcacagatacaattcacaaaagcctcaaactgatcaccagtctccggcaaaatctgctgaagttccgattcttcatgaataaaaccttttctggatgtctcatgataataatattttgcgaccatctggcagagatatctgtacatttcatcctcatcaccgggtacataacctgaataaggaacaacctccaaagtcgtatcaaacatacagaaaaaaactttcttaattacaacatcctgccatttcacattatttcctcccatcttctgctcactctgccccattatacataataaccgtaaagaatgtcaacttttctttcctgtattgactatctcacagcttgcgtctatactaagggcataaaaagatttgagggaggcacctacatggacaagaatgtttccaaagaggtcaaacgaattatcatctgctgtatcgcatcctgcattatagccgtcaatatccggacattcgtccgcaccggcgggctgtttcccggcggcgcaaacggcctgacattgctaatccagagcatttttgaccgttatcttcatatagcaataccttatactgctatcaacgttcttctgaatgccattcctgtttatatcggttttcgctttatcggcaaaaaattcacgctttgttcctgtcttgtcatattcctcaccggttttctgacagacagtctgccggcttacaccatcacctccgatattctgctgatcagtattttcggcggtctgatcaacggtttcgctatcagcctttgtctgaaatgtgatgccaccaccggcggaacggattttatctccattttcctgtcccgcagaaagggcattgatgcctttaatatcattctcggcttcaacgtcgtgatcctcgctatcgccggattacttttcggctgggataaagccctttattccatgattttccagtatacatccacacaggtactgcatctgctttacaaacaatatcagaaacagactctttttattgttacgaacaaagcagaagccatctcgcagctgatctatgataccactgttcatggtgccactatcatcgactgtgaaggtgcccataagcacagcgagcataagattgtctactctgttgtgtcccgcgatgagaataattcagtcatccgcgcggttcgcaaggcagatccgcaggcatttattaacagtatgcctaccaatgaactggaaggccatttctatcagcggccgatcgactagtacatcgtccttcctgtttatcttagcattgacatttggggaagtaaaatgcctgtatgggtatatgattcatatctaaaagttaatacgcatttatttttttaacaagcaataaagaaaaataaaaggaccctattggtccttttattgttttaatatatgaattttgatatttccacgagtaaacaaaaaatcctaataagcaacatatcttatgcgtattaggattttttcatttattctttatatctatttatggtcatcggggtgacaggattcgaacctgcgacctcttgatcccaaatcaagcgctctagccaagctgaattacggttccgagagctttcggctatgagatttacacagtgatcagcggcagtatggaaccggcgataccgacgggcagtctggtgtatgtgaagtatatccagccggaagagatccagacagaggatgttattgctttctatggaacggatgcggatggttctattgtcactcatcgtgtggtatccaacagtgcggctatgggtaattttatcacgaagggcgatgccaacagtgataatgacatgaatcagatacttggctcagtagagccattgagcaagaagcccccacttcaaaatctgtgatttaagtggtgggagcatgtcactaaaaaaacgatattgaaatgattttaatatcgttgtcgagagcgtttaatattgatgttggtaggagagtttgggagacttttctgccggcgttttgatttcaaattaaatgaataatcagtattaaattacaggtgtttgtggtagtatataatctgaggaaaattgcgcaatatggcttctaaaaatgatgtattttagaatgatataagaaaaatcagaggaaggacttgaatattaatgtcttttaacattattaaaaatacacttgaaacccaggaaaatggcgttctcatcatcgaaaatgatgtatatcgtattaaaatgagatacattggaaactatacggaagacttgaaaaaccataaacttaacactgactatttaacagtcaattcaaaaatcaagcaagctcattctgtatatatgcctacattcacacttatgcatgacgaggtaatgtttaaaattattgatacaggcgctggcatctttgatgaaaaatctatggacaacatgatagcagatttcacgctggctcataggtgtcttaatgatttcaaacgtatcattcagcaatactttccaactgaataacgcaaaacccctacgtgcacaacctgcaagatagaaaatcgtcttgcattatataggtcgaaagaatcctaaaagtcgttcgtcaggcgacccttatataggtattccgctttatacttgtgatatatcaaaggaaggagaggactcatgagagacagatcaaaagaaattgctatgctggaggatactcttaagatcttaaagcagggcaggtatgaaaaaaatggtaatttcttccagaaatgtggaatgcttatggtgaagaattagtttgtatgataaaataacaaagtgattatatagccataagcagagtatggtagaaagaggataaaaatgagagaaggaaaaggaattgccctgttgccaattggtgtatttcttgtattataccttggcctgggcattttatttgagtatgtgatggagattccaatggggttttacaatgtgccaatcgtcatcgcatttcttgcggcgattctggtggcctgtctgcagaatcgagcgttgaattttgatcagaaactggagattatggcacagggagtgggtgataagaatattatcacgatgctattaatctttctggcagccggttcatttgtgggtgttgtggggagaagcagtgcagagagtgtggcctattgcatgctgagtctgattccggcgagattttcagttgcggtgctgtttatcgttggctgttttgtatcagtggcgatgggaacatctgtgggaactattacccttctgacaccgattgcagtcgctgtttctacagcgtccggatttgatctggcgttttgtgtcgcttctgtgatgggcggcgccatgtttggggataatctgtctttcatttcagatacaacgattgctgcatgtaatggacagggatgcgagatgaaagacaagttcagggaaaacttctggattgcttttccggcagctgttgtgacactgattctgattcttatgctgtctttccagacagaaattcagggacatgtgattcagccataccatttgacgcaggtgattccgtatgtgctcgtactgatcggaggcattgtaggtatcaatgtatttgttgtactgctgatcggtattgtgtcaggtgcgttgattatgctgattggtggccatactgttcctgtagagattcttaaaaacatgggctccggtgtctccggaatgtttgaaacctgtatggtagctattcttgtagcggccatgtgtgcgcttatccgtgagtatgggggatttgatgcacttcttagctggatacacagaatcttccgtggaaaaaagggtggtcagcttggtatgggatttctcgtcggcacaatggatattgcaacggccaacaatacagtagccatcgttatggcaaacccgattgcgaaggaaatggcagaggaatatggcattacaccgagaaagacagcatcgcttcttgatacattttcatgcgtttttcaaggggtgattccttatggtgcgcagatgcttgtcgcaatttcagcagtgaacgaacttggcggagagatttcagcctttcagatcatgccgaaactgttttatccgctgcttttattgctcagctctctgattacgattatgaagagcacgtataaatgttcaaattttcatacatagattggcgaacggcgcggtttctggtatgatgtaagcaagagaagcgtctcttgtgttatttataggaagatgatttttacaaggagggttttacaatggaaatgaaagcaggaatgaagtgcgaaacagaaattgttgtgaacgagggcatgcttgcgaaccataacgatccacagcttccggcaattgaattgcctgcagttttctcaacaccgagcatgatcaatctgatggaactgacctgtgccaaattgatggataactgtctggaagaaggcaaaggttctgtcggtatgtctgttgaagtcaaacatcttgcttccacaccatgtggcaagaaggttcgctgtgaagtagagattacagaagtagtgaatggcaagaaagtgacatttgctgtgaatgcgtatgatgagaacggtctgatcggtacaggcacacataaacgtgcggtgatcaacaaagctgcatttaatatgtaagaaaatactatttcacgaatatacttatctatagtatacttgtcatagctcatcgggggctatttgttcaatggaaacaatagctggataagatggcaggctgagaggcctgctgcttatccggcttttctttttagtgtcagatggatgagccgtctgccgaacacatctttattcaaagcacagggaggaagaatatgaatgatcaaagaaaaaggcagataaatgattcgcagaatttccggacggacagggtgctttcttatttcaaggtagagtggaaggttttgcttgctgtgactatttcagggctgatctataatgttggacttctggcaggaccctggtttgagggaaagatgacgggatgtctgctgaatatcctgaatggaagcggtgcattcgcggatatgcggattctggtgattgcttatgtggtatccattgcaattgttcagacagcaagatatattaaacgtttctatgtacggcgttttgccaataatgtcaaccggcggatgaaagaaatcttgtatgggagcctggtccgcaaaagcagggccggtctccatgaagagggtgaaggcaatatcatgacgaaagccattctggatgtggatgactgtgccgagggcatgcgcaaatttacaacagagatttttgataccggcgtggcactggctgcttatgccggcatgcttttatattatgactggcgtctggcactgctgtgtatggtctttccgccggtttcttataccatagcggagaaaatgaagactgtggtacagcgtaccggtgccgcttacaaagtgcagtccggtgttctgagtgaggcaacactggatcgggcacagaatgccatcacgtatcgcgtattcggctgtgagcaggaaaggcagctggcttatgaggagaagttgacagcctatgagcgatccgctgttaaggcgaacatatggaatgcgtctatgccgcccatctacaggatgatttctatgaccagtgtgctttttatcctctatttcggacagaaaaatgttcttggaatcgggtggcatccatggacgatcgcatcgtttacaacatttctggcatgttttgtcaagctggcggtgaaatcttccagtgctgccaagttatttaatgcggtccataaagcccaggtttcctggaaacgaatccgcccgctgatgcagcaaaggaaagagcaatatgaacgaactgtctgtccgccggcagatcttaaggtccggcatctgaattttgcttatccggagggcaaaaaagtactggaggatatttcctttgaagcaaaaccgggtgagatcattggcattacgggaacggttgcctgtggtaagtcgacgctgggaaaagtatttttatgtgaatatccctatgaaggtgaagtcctttttgggggaaaagaactgcagaaacagtccgcatctgaaagaacgggaatcattagttatctggggcatgatccggagctgtttaatgacagtattgaagcgaatgttttaatgggagatcaggcggatgcggcatattttcttcaaatggtctgcttggataaagaagtggatgaaatggatgatgggctgaatacccttgtgggcaagggcggcatacgcctgtccggcggtcaggctcagcgactggcactggcacggacactttgtcaccaaaagccggttctgattctggatgatccgttttcggcattggataaaaatacagaaaaacagatttttgccaatttacgacaaatgacaaaagacacagtgttgctgctgatttcccatcggttgtatctgttccctgagatggatcgggtactgtggatggaaaatgggcacactatttcgggtactcatcaggaattgcttgaaaaagtacctgaatatcaagtactttttgaagcgcagacagaggacagaaaccggtcagatgcgggagcacatacagatgagaaggtacattctgataagaatgtatttgaaatggagcaggcaatacagaaagcaggtgcagacaatggcacaaaataaaaacggacaggtcaaaagggtgattttggatacgattgccagatggaaaggactgtctttcggcattgtctgtgctgttatcggtgcagttgtatttgcattgataccgccgttgattctggcgaaaattgtcgatacagtgacagccggaaaacagacatcatgggctgtgatcatgctctattttgttatgctggcagtggtggcatttatggagtctgtcagagagggactgctgattgcattcggacagaaaattacgcatgccctcagaagccggctgatggagaaatttgttcatttgacggcggataatatcaaccaacaggagccgggaacacttgtctcaaggtttgtgggggatgtggatacggttgagaacttatttacttcaggcattatcagtatgtttgcggatgtctgcaaaatcatcagtattttggtggtgatccggtttaagaatcccggtctgacagtggtattgattgtgatgctgccgttcctgttcgtatttacaagacatgttcaaaaaaatatgctgacagcgcagattgagaaccgaaaagcagttggccgggcctcaggacatgtgcctgaaacgcttcataatatccggacaatccattgcctggcaatagaaaaatatatggaaaagcgttatgatacatatatcagtgaaagctattatgccatggaaagaacaaatttttacgatgcgatttattcaccggttattcttatactaaatgcggtggttgttgctgttgttatgctgctctcagcctccggcaatccgcatgtgctgacatttttcggaatgtcagccgggacggcggttgcggtgatcaactatatttcccagatatttacgccggtggagagccttggtatggagattcagaccattcagtcagcagttgcaggtattcacagaatcaatgaattcctggcccttgaagaactgcctgataaagatatagaatgagatgagaaatgcggcagcgtcaaaatggagaaaacagcagaaaatcagacacagtatggggaagaccaagggaaagcaggcgttccttttgttgaatttcgcgatgtgacttttggatatgacagtcatattgtactggatcatgtgagcttcaaagtgatggatggtgaacaggtgacgttgtccggccgtaccggtgcgggaaaaagtacaattttgaagcttctgctgggactttatgagccgcagcagggggaagtgctgatacacgggcagtcggcatccgagataaaggaggcatcaagacgctgcttgtttggatatgtggaacagtcatttcatagggttcccgggacgatcagagatcagatcacgttgtttgatgacaagatttcagatgcacaggtacgcgctgtggctgaactgaccggactgaaaacagcgatcgaaagtctggaaaatggctatgatacctattgtacgccggatcttttttcacagggacagtggcagctgctttcaattgcaagggcggcagccgctcaaccgaaattattgttgctggatgagattacagccaatctggatgctgaaacggaaaaagcggtacttcgtgctttgaagaaagtcgctgaaaaccgaacggttatttctatttcacaccgcacctccgctgaaatggggcggattatcgcactttaaaaaataatagtttgctaagatattgttaaaaatcatccgtcgtggtacaataacagttgcaatgttaaaaatggtgtatccaaagaattgcggtttcctgacgggaatcggtattttcggatacagaagatagaaggagataagtacaatggttaattttaaagaagatgaacagttgaaaatgctgaaccattcctgtgcacatctgatggctcaggcaatcaaacatctctatcctcaggctaagttctgggttggacctgttgttgcagaaggtttctactatgatgtggatttgggtgacgatgttatcagagatgaagatatcgctaccatcgagaaagagatgaagaaagttgccaagagcggcaagaagattgttcgtcatgagatttccaaggaagaagcccttgagatgttcaaggatgatgaatacaagattgacctgatcaatggtctggaagatggcaatatttcatgttacacacagggcgatttcacagatctctgccgtggacctcacgtagacaatgtgaagttatgccgccacttcaagttgttaagacactccggtgcatactggaagggtgacagcaagaacaaggtgcttcagagaatctacggcgtatgtttccctacagctgaagaattggaagcacatttacagctccttgaggaagcaaaggaaagagaccatcgtaagatcggcaaggacatggaactgttcatggtagacgatcttgttggccgtggtcttccgatgttccttccaaagggttatactatctggcaggaactcgagaactacatcaaggagaaggaacgcaagctgggttatcagcatgttatgacaccttgtgtcggtactgtgaacctttataagacatccggtcactgggatcattacaaagagaacatgttccctgccatggaagtagatgatgaagctttcgtactcagaccaatgaactgcccgcatcatatgatgatttatgcgaataagagacattcttacagagatctgccgatcagaatcggtgagatcgctcatgatttcagatatgaagccagcggtacactgaaaggtatcgaaagaggcagacatttctgccagaatgatgcccatctgtttgtaacacctgagcagattaaggatgagatttcaagagttgtagatctgatcttcagcacatacgaagatttcggcatcacagattacagatgcgttttatctctgagagatcctgaagacaaagcgaagtatcatgatgatgatgagatgtggaacaaggcagagaacgcactgcgtgaagttatgaacgaactcggtcttgaatacacagaagagatcggtgaagcagctttctatggccctaagctggatgtcaatgtgaagcctgctgtaggtaatgagatcacattgtccacatgtcagctcgacttctgtttgccggcgaaattccagctgacctacgttgacaaagacggcgagaagaagacaccggttgttctgcatagagcgatcctcggttcccttgacagattcatggcatatattcttgaggagacaaagggcaatctgcctacatggcttgcaccgattcaggtgaaggttatgcctgttaagaccgacgatgatggtttgaatgcatatgccaatgaaatctgtgaactgctcgaagcgcagaatgttcgtgttgatctggatgacagagcagagaaactgggctatcgtatgcgtgagggacagatccagaaggtaccatatcttcttgttatcggtttcaacgagaaggataacagaacggtttcctacagacttcacggcgagaaagatacaacagttgtgggccttgatgaatttgttgagaagattgttgatgagatcaagaacaaagttcattaaagtcgattttggatggatcagtcagatactgaatgaaagtctttgttagtacagaaacacggtttaacggcatggaagcaatgccgatggcacggtactgcggcgggtcaataggacggatctccaaactgtaattgaggtttcgcaggatcagttccggcatgatggtgatgccgaatccgtgagataccatggagataacggacaaatcatcattcaggacatagcggacattcgttttgtcgcgggttgaatttaatactgcctgaatatcattatcagagcctttggttggcaaaaccaagggctctttttttatttccgggagtgtcagaacattctgccgggtcagggggtgcctttcaggaagaaggacattcatgggatccttatacagcaggtgaaagaccagcgggtcagcaacaggagccgtcagaaagccgcagtccacgcggccgcttaaaatacgctctgtgatttcatcgtagtcacccgctagcagatcgaattccacaaggggataatctgcctgaaacttgcggatgatggtcggaagccactgggtggaaacactggtgaaggtggcgatccgcagggtgccggctaccgtttcgttgatatcgtaaatggcctgagaaaaaccatgctgatcgttgaccagagtttgtatgtaaggcagcaggcgtttgccgttctcagtgagggtgacgccggaagcacttcttgccagaagggaaaatccggtctctttctccaaggcggcaatggcatggctgatgccggcctgggtatagtgaagaatctcagcagtctttgtaatattgccgatttcggcggttttcagaaaaatttcatagcggtttaaaatcattgtaggcacactccataacttttatgaatgataagtattaatattattctcttttcaaatgcttagatagttgtataatactccatggaaaacaaaaaagcaaggcggtgttttgcaatgccaaattaaaaaacaccttgaaataaggatagaggagtaggataaggttatgagagagtatggatggacacagcagagagcggacagtatactggcgctggttgcgatggcatggggaagttcctatctgttgatgaagattggtttggatggtatcccgccgttttgtattattgcattaagatttggtatcgcatttattgcggtttcgtttttgttttttaaaaagtttaagaagacaacgaagcgtgtgatgatgaaaggtgcagttcttggcttgttcctttttgggctgtttgcgtttctgatgcatggccttcagacaacatccgcttccaatggcggttttctgacaagtacaactgttgtgctggtgccgatttttcatgcggtgatcaaaaagaaaatgccggatcaccagaatgttttgagtattctgctgacgatgacaggcatttgtctgcttactctgcagcagtcactggtgttccacagcggtgatattctctgtcttgcaggtgcagctgtgtatgcggtgcagattctgttgacggacaagtttgcacaggaagaggacggaatgctccttggcatttggcagcttggatttgcagcgctgtatggtgtcatttgtacatttatgtttgaaacaccgacattgccgtcaagcggtttccagtggattgcaattttgggcctggcatttgtatgcagcgcctttggattcgtgatgcagccaatggcacagaagtatacaacaccggaacatacaggccttttgtttgcactggaaccggttttttcagcggtattctcatacattttcctgcatgagactttgtccgggaagggttatatgggcgcaatgctggtaatggccggcgtggttgcagcttctgttgtcagggaaaagagacagccggtacgcgttgtggcacatcagtcctaaaagtaaatatagtattaatgaatagagataaaagcactgaaaccatgataaaagcactgaaatcggtcgtggattcagtgctttttatcgttcagcgcttattttaaataccgccacattggtatagggactctcaaaatacagacgataggcaatgtggtatttgccggaattgatgcataaaatataagatacagctgaacacatgaatttatcgaatcataaatgtaagcaaattgaatcaatcggatcaaatacgaattgactcgattgactcgatttgctataatataagcagaaagtgatggaggggatgacaagatggtatttcaagaaagcgaaacagtagaactcaaagaagttgttgttgacgatatcaggaaagaaatcattgcctttgcaaactgcgatgggggaaagttatatattggtgttcgagacgatggtacagttgtgggggtggataatcctgatcgtacggcattgcagattagtaatatggctcgggatgcgattaagccggatattacgatgttcatgcattatgggacaattgaggagagtgggaaaaagattgttgcaattgacattcagagaggaacagatcgcccttattatatagctaaaaagggaatgagaccggagggcgtgtatgtacggcagggatattcggcagttcctgctacagatacagcaattcggcatatgattaaagaaacagatggagaccgctttgaagccatgcgcagtttgaatcaggatctgacttttaatgctgtgaagaaagcgtttgaacagcggaatgttgattttggcgttcagcaaatgcggacattgaagataattgattcggatggtttgtatagtaatctggcgatgcttttatcagatcagtgcacacatacgattaaggtggctgtttttcagggaacagatcagaccgtttttagagaccgaaaggaatttgcaggttctcttatgcagcagatgaatgatgtgtatgcgtttattgatttcagaaaccagacacatgctgccatagaaggattgctaagaattgatacgagagattacccggagattgctgtcagggaggcactgctgaatttgctggtgcatcgggattattcttttagtgccagtgctttgatcagtatctatgaagataggatagaatttgtatccattggcggacttgtaccggggatagagctggaggatgtgatggcgggaatttctatatgcaggaatcaggatttagccaatgttttttatcgcttacagttgattgaggcttacggcaccggcatcagtaaaatgatgatggcctatagagatatgctgcagaaacctgtgattgagacaacgaagaatacattcaagattatattgccaaatgtaaatgtacagaagcagtatgctcagacgaaaccgcctgtatacagagtcgaagatcagtcaatgcaatatagttataatgctgcagaaataaaaagtttatccgatgaggaagaaattattttggagtatatcgggaagcatgatagattgactaagcaacaagcagcagaattgcttgaagtgagtgcttccacggcgacaaggttacttaaacggatggttgagagtcatatgcttaagcgtaacggtaaggcaaggaacacttattacacggagataaaatagcacttgagaataattccagaaagttttttacgttaatgtactaaaaaataaacattttttgcctgtgatggttgatttttgcagaaatttagcgtatcataataccattattgcttaattaaccgggcttatttgtcagaatcctgataggtttgtctatcaggattttgttttgtcaatgtgccggttggaaagaggttttaacgtttttatggaagcattttcacaatttgtcggtcatgtagactccatgatctggagcatggttcttgtgctgctctgtctgggtgtcggtctttatttatccattcgcatgaaattccctcagattcgttttttgaaggaaatggtgcatttacttggagccaaagaggagagtgagaacggtattacaccgtttcaggcttttgcaacaacagtgggcgctcgtgtgggcatgggcaatattgccggtgtggcatcggccatttatttcggtggcccgggatccgttttctggatgtggatcatcacattgatcggtgcggcttctgcttacacggagtcggcactggggcaggcctataaggtaaagaatccggatggtgagtatatgggcggaccggcctactatatcgagaagggacttaaatgcaagccgtacgctattttgtttgcggcggtggcatttcttggcccgggatttctgatgcccggggttcagattaattcactggtgacggtttttgaggaagcattttcagtgaataagattctggtgggcgccatttgctgtgtgatcctcggtattgttgtatacggcagtatcaagcgtatcgccaagatcgccgagatgctggcaccggtgatgtgcggtatttatattgtggcagcggttgttattcttggactcaatatcacaaagcttccgggaattcttggaatggtggtttcatcagccttcggcaaacatgcagtttttggcgggattcttggttctgctgtttcctggggcgttaagcgaggtatttattccaatgaagcaggtatgggatgcggtgccatcgtctccgcggcagcagaatgttctcatccggcgaaacagggactgatccagtcgttttctatttatgtggataccttatttatcggaacagcaaccgccctgatcatcttgctgacaggtacatttgatgtctgtgacggcgcaggcaatctgcttcttgaccagacaggcggcattgaagccggtatcaaatggacacagtatgcgctgatgaatacattcggtacatggagcggcaaggcgctggcgatcatcattgtgctgtttgtctttacatctatgacgggatattgttatcaggcagaagcgaatatccgttatctcacccacaacagcaaattggctgtcaatatttgtcgtgccgttttccttgcagcctcatttttcggagccattgtgaatgcagatgctatctggtccatgggcgatatcggctatggacttatggcctgggccaatatcattgccattgctctgttggcgccgaaggcatcggccatgctagaggattacgaacagcagaagaaggaaggcaagaatccggtctttgatccgacaaagttcggaattgaggatgaaacaggggcctggaaacgtaagtaaatgtttatacctggaacagattgccgtgatgcatcctgcttagaaaagctatattaagcatagagaagaaaatcaggcatagagaacaaatgaaagtgagacagatgaatggaacaggattatatatatatggaagaaacaactgtgaaatcaagttcagaagttcgaaacgttcatattcgcatccgaagtgttgtggaaggtgttgagaacctgtgggagacaaccggagaatacaaatgggacggcaggcagcatatgttggcctatacagattatacgggcaatgccattaccaagaacggtatttttgcagatcatgagaaaatgctgctgcatcgtgtgggcgcgattacatgtgatatgctctttgatccattgacagcaacaatggtagattataaagcctacatggtgggggcaaagtttctgctgcatacagagacatattctatggaagagaacgaggtaggattgaatatccgggtgcaatatacgctggatgacggcggtggtcatacaccgattgtcggggagcaggagattaccgtagagtattattgataaaaaaacacatcaagctttcgttattatgaattgacatgcaccccctgggggtgtatattgacatatggaaacagtatgtcagcaggatgacatatctgtgagaaaaacagcatgacttccgcgataaatatggaattaaacagaagcggtgagccttgagtgaatgacgaaaggaaatgcataattatggtaaaaacagtattgaaaattgatggtatgatgtgtggtatgtgcgaagcacatatgaatgatctgatccgcaagaatttcaaggtgaagaaagtgacatcttctgccaaggatggagagacagtgatcatcagtgatgcagagctggatattccctgggcaaagaagcagattaaagatattggttatgaactggtagattatacaagtgaaccttatgaaaagaagggcctgtttcattttgggcgaaaatagtcctgcatatatcttgtatccccgggaaaagtgtgataagataatttcaatgcagtaaagtggtactattccatagaggaatctgagaaatgtatcagctatggatcagctatggatcagagagtggaaaatggaccatcagaatggaaggagttatctgttatgtatattacctgtttggatgttgaaggcgtactggtaccggagatttggattgcatttgcagaagccagcggtatccctgaactgaagaagacaacccgtgatgaaccggattacaataaacttatgaactggcgtctgggaatcctgaaggagcatggcctcggattgaaagaaatccaggagactattgcgaagattgatccgctgccgggggcgaaggcattcctggatgagctcagaaccttcacacaggtgattctgatcagtgatactttcacacagtttgccacaccgctgatggagaagctgggttggccgacattattctgcaacacactggaagtagcagacaacggcgagatcacaggcttcaagatgcgtacagagcagtccaagctcagcacagtcaaggcgctgcagtccatcggatttgagaccattgccagcggtgattcctataacgatctgggcatgatccaggccagcaaggcgggattcctgttcagaagcacagacaagatcaaggccgattatccggatattccggcttatgagacatatgatgaactgttggatgccataaaaaaggcgatggtgtagtgcgcttagcatatttagttaatgattttataacatattgtggatagacaagaggaatatttgaatgatacatatcatttgaatattccttttttgttgatgaatgttaataaaactttagtatatgctacaaaatgttgccttttcgttaaaaagtcgacggaatcatacaaaaacggcgtcgtctctgttgacaaaatagttttgcccgttataatagatatgagtattctttttatgaaaaagaaaaatttttcgttcttccgcggcaaatatgcgctctcagcgtaaaatatgactaaaaaagagattcatatagcatgcaggtttgaatcaaacacgttcattggggaagaacatacagaggagagaaaatatgtataaaagagaatcaggcggatggctgaaacattatgattttctgctgttggatatgatttgccttcagattgcatttttgctgtcatttgttgtattgggaagaggtttcaatccgtatagtcatatattgtaccggaagatggcgctgtatttagaattagcagatgtggtggttgtcttttgctttgattcattttcaggcgtattgaagaaggggtattatcgtaatttcgtgtcgaccgtacagcatgcagccattatctttgcgttatcagtattgtatcttttcctgtcaaaggaaggacagctgtattccaggttgtcactggtcatcaccttcgtattgtatatttttattacatatgctgtcagagaattgcgcaagcgtgaaatgcgcaagcagatggagacgggaagcaagcagtccctttttattgtaacgacagaagacattgcgggacaggttgtagaccgcatgttgaagaataattatgccagatacaggatggccggaatagcagttatagacaacagtgtgcttgggcatagaatacatggggtagatgtggttgcagatgcggcaacagccgttcactatatctgtcgtacatgggtagatgaggtgctgattgtgatttccgataatcagccgtatcccaagaaattgattgatcagttaatcgagaccggtgttaccattcatctgaatttagctaaggtgtccaatatatccgaaaagaaacagtttgtagaacaaatcgggccatataccgttctcacaacgacgatgaactatgcatcggagcgtcaactgctgatcaagcgtgtaatggacattgcaggcggacttgtgggatgcctgctgacaggaattatatttatctttgtggcaccggccatatatatcagttcaccggggcctattttctttgcccaggaacgtgtgggaaagaacggcaagaagtttaagatgtacaagttcagaagtatgtatatggatgcggaagcccgcaaggcagaactgatgaaagagaataaactgggcgacggcaagatgttcaagatggactttgatcccagggttatcggcaacaggatactgccggatggcacaaagaagacaggcattggtgattttatccgtcgaaccagtctggatgaattcccgcagtttttcaatgtgttaaagggagatatgtccattgttggtacaagaccgcctctggtgtctgaaacaaaactgtatgaattgcatcattatgcacggctttcgattaaacctggcattacaggtctgtggcaggtcagcgggagaagtgatatcacggacttcgaagaggtggtacgccttgacagagaatatattgataactggaatgtgggaatggacattaagatcctgctcaagaccgttgcggttgttttgaaaaaggacggctctatgtagcagatgaaacaaccattgaatgaaaaatgattttttaagaaacgaggaatggctttatgaaaggaattattcttgcaggtggttcaggtacccgcttatacccattgacaaaggtgacatccaagcagctgctgccgatttatgacaaaccaatgatctattatccaatgtcggttctgatgaacgctggaatcagggatattctgattatttctacgccccaggatacaccgcgatttgagaatctgttgggagatggtcatcagttcggtgtgaatctgacctatgctgttcagccgtctccggatggactggcgcaggcttttattatcggcgcagattttatcggcgatgattcggttgccatggtgctgggagacaatatctttgcgggacatgggctgaagaaacgcctggagacagcggttcataaggctgagaatggcaaaggcgctacagtatttggttattatgtggatgatccggaacgttttggcattgtggagtttgataagaacggaaaggctgtttctattgaagagaaaccggaacatccgaagagtaattactgtgtgacaggtctttatttctatgataatcgtgttgtagaattcgcaaagggactgaaaccatcagcccgcggggagttggagattacagatttgaaccgtatttatctggaggacggctcgctgaatgtagagttgttgggacagggatttacatggttggatacaggaacccatgagagtctggtggatgcaacaaatttcgtcaagactgtggaacagcatcagcacagaaagattgcatgtcttgaggagattgcctatctgaacggatggatcagtaaagatgatttgatggaagtttacgaagtgatgaaaaagaaccagtacggacagtatctgaaggatgttatggatggtaaatatcaggaacatctgtattaattcagcaaatagatagttaatgtgtatagaggagtattgaaattatgaatattatcgttaccggcggcgccggctttattggcagtaattttgtatttcacatgttaaaaaaatatccggattatcgtattatctgtttggacaaactgacatatgcaggtaatttatccacattggcaccggtgatggataacccgaatttccgtttcgtgaaagcagatatctgtgacagagatgcagtgaatcagttgtttgaagaagaacatccagatatggtggtcaattttgcagcagagtctcatgtggatcgttctattgagaacccggagatttttcttcagaccaatatcatcggtacggctgttctgatggatgcctgccgcaaatacggtattcagcgttatcatcaggtatctacagatgaagtatatggcgatctgcccttagacagaccggatcttttctttacagaagaaacacctatccataccagttctccgtacagcagctccaaagccggtgcagacttgcttgttttggcttatcacagaacctatggactgcctgtgactatcagccgttgctccaataattatggtccatatcattttcctgaaaaactgattccactgatgattgccaatgcactggctgataagtcattgccggtttacggcgagggattgaacgtccgcgactggctgtatgtagaagatcattgcaaagcaattgatctgatcattcataaaggacgtgtaggtgaagtctacaatgtaggcggacacaacgagaaacagaatatcgaaattgtcaggattatctgtaaggaattaggtaaacctgaaagcctgattacccatgtaggggaccgcaaaggccacgatatgcgctatgcgattgatccgactaagatccacaatgaacttggatggctgccggagacaaaattcgaagacggtatcaaaaagacgattcaatggtatttgaataaccgtgaatggtgggagacgataatcagtggcgaatatcagaactactatgaaaaaatgtacagcaatcgttaattgacaccgggaggaaagaatatgagattttttgtgacaggtgtcggtggtcagctgggacacgatgtaatgaatgaattgctgaagcgcggtcatgaaggggttggatcggatattcaggagtgctacagcggtgctgcagatggatcagcggtgacgagagcaccttacagaacgcttgatattacggacagagaggctgttcataatgttatagcagagattcatccggatgttgtatttcattgcgccgcatggacggcagtggatttggcagaagatgaagcgaacattgataaagtgcgtgcaattaatgcaggcggaacaaagaatatagcagatgtctgtaaagaattgaattgtaaaatgatttatatcagcacagactatgtctttaatggtcagggaagcgagccatggcggccggactgcaaggattatgcgccgctcaatgtctatggacagacaaagctggaaggtgagctggcagtgagtcagatattggagaaatattttattgttcgcattgcgtgggtgtttggtgtgaatggcaagaattttattaagaccatgctgaatgtgggaaaaacacacgatacggttcaggttgtcaatgatcagattggtacaccgacctacacttatgatctggcaagattattggtggatatgagtgaaacggataaatatggatattatcatgcaaccaacgagggcggttatatcagctggtacgattttacaaaagaaatctatcgtcaggccggttatcagaccaaagtactgccggtgacaacagaagaatacggacttagcaaggctgcccgtccgtttaatagtcgtttggctaaaggtaaactggtggaggcaggatttgtaccgcttccaacctggcaggatgctttaagtcgttacttgaaggaaattcaatattaatgtgagtgggagatagatgaaatgggacagatcaaggttgaaaaaaatgtcggcggtattgcaggactctgtgtcattgaaccggcggttcatggtgatgcacgcggatacttcatggaaacctacagtcagagagatatggaggaaaatggtatctgcattcagtttgtacaggataatcaatcgatgtcttcaaagggtgtgcttcggggcctccattttcagaaacagtatccgcagacaaaactggttcgtgttatcaaaggctccgtttttgatgtggcagtggatcttcgaagcgaaagtgagacctacggaaagtggtatggcattgaactgacagaagagaataagaaacagttccttattccgagaggctttgctcacggttttcttgtgctcagtgacacagcagaattctgttacaagtgcgatgatttttatcatccgaatgacgaaggcggtatggcctggaatgatccggaaattggtattgaatggccgaaggtgaaaggtgaatacagaggcaatgcagatgcagagggatatacattacaagatggtactgcattgaatctgagtgataaagatcagaaatggttaggactgaaagacacatttaaattttagaatgatttatttggggtaatagaagatgcagcaaaatagagatatacagcatgtctacctggttggagctaaatcattaggtgcatatggcggatatgagacttttatatataaattgacggaataccaccaatataataaaaaaataaaatatcatgttgcatgtaaagccaatggcgatggctatatggatgaaagcaaattggaaggtgcagctttgattaatgatcatgaatttgagtttcataatgcgcattgttttaaaatcgatgttccgcagattggctcggcgcaggcgatttattatgacgtggctgcattaaagatgtgctgcgaacatatcagaaaaaatcatattcagcatccgattgtttatatcatggcttgtcgtattggcccgtttgcaagacatttttataaagaaatccatcaatgtggcggtcaagtttatctgaacccggatggacatgaatggatgagagcaaagtggtctgcgccgattcgcaaatattggaagatttcggagcagatgatggttaaatattctgatctggcaatctgtgattcggtgaatattgagaaatatattcatgcatgctatgatggcaaaggaatcaaaggcagaaatccaaagacaacgtttattgcatatggtgctgatttaacattaagcaagctgaccgatgatgatgaaaaattggtcaactggtataaggaaaaagggttaaccaagaagaattattatcttgtggtgggacgttttgttccagaaaactcttttgaagtgatgatccgtgaatttatgaaaagtcatagtaagaaagactttgcgcttattacgaatgttaatgacaaattcttgaatgaattggaagaaaaattacattttaagcgtgataaaagaattaaattcgtcggaactgtttatgatcaggaattattaaaaaagattcgagaaaatgcctttgcctattttcatggccatacagtgggcggtacaaatccaagtcttattgaagcattgggcagtacagatttgaatctccttgtagacgttggttttaaccgggaggtagctgaagattgtgctttatactggagtcgtgatgatggttcactggcaaagttgattgacagttcagatcagttgaatgaaaatcagattgcagagatgggacgaaaagcaaaagcacgtgtggctgcggagtatacatggaataaaatctgcggacaatatgaagaagtgtttgtaaaataaaagaaaaatgggcgagttatagattagataatttttaggataacattatgaagatactacattatgcattgggttttccaccatatcgaagtggaggattgactaagttttgcgtcgatttaatggtgcagcagacaagagaagggcatcatgttgctatgctttggccgggcaagataggattaatcaataaaaagactgcaataaaaagacataagaatgttgaattaaatggaaaaagtatagacagctttgagattgttaatccgttgccagtaccgtttgatgaaggaatagcggatatcactgcttttactgcagacgcagagacaggtgtatatgatgaattaatggcttcgtataaaccggatgttgttcatatacatacttttatgggattacataaaagttttttgatggcagcaaaaaaaagaaaaatcaggatggtgtttactgcacatgatttctttcctatatgccctaaggttacaatgtttcagcagggagctatatgtggtgatgcgaaaagctgcaaaggttgtggagtttgtaacacgacgtcattaagcctgaaaaaaatacagattcttcaatcgccaatttatcgcaatttaaaggattcggttatagtaaaaaaattaagaaaacagcatagagacaattattttagtgaagaagcatttgataatacaactcaacctgtgggcacagctgaagattatgagaaattgcgagattattattattcacttttgaaaataatagacgttatccattacaatagcagtgttacccaaagtgtttatgaatctttttttgatttgcctgttagttgtaatatagctattacccattcagatattaaggacaatcgtgtaataaaagaattcgctgatgataaattgcggatcagatatttgggaccaatgaatggtgcaaaaggctattttcttttgaaggaggcgttagataagctttggggtaaacgtcaggatttttctttagacattcattttgcgccaaatgatatgatgccatatgtaaaggttcatggacgttatacctataaagatttgaaaactatttttaaggaaaccgatgttttaattgcaccgagtatttgttatgagacatttggttttaccgtgttagaggctttaagttatggtgttccggttataataagcgggactgttggagcaaaagatattttagtcaacggtgcaggaattataattgaggacatatcatccgaaagactatgtaaagtattgcaaagacttaccccaggtgaattgaaagaaatgaatcagaaaatagttgctgaacaatttattatgcaaatagaagacatggaagaacagattgaaaagatatgttatggctggtgatgaagaagtgaaactttttggagtgaggaaaggaatacatatttatggaattagaaaaaattagtgtcattgtgccagtttacaaagttgaaaaatatttaaaacgctgtgttgaaagtattgtacaacaaacatatcaaaacatagaaattattcttgtggatgacggaagtccagacagatgtcccgaaatgtgtgatgaatatgcaagaagagatgccaggattaaagtcattcataaatcaaacggtggtctttctgatgcgcgtaatgcgggattgaatattgcttcgggagactatatttcttttgttgattcagatgattggattgaagaagattttatagaaatactttataaaaatatgaaaaaagaaaatgcggacatatcgattatcggatacacattaatctgggaaagcggaagaaaaaaacggtttaccagtgatgatgaatattatgtatttgataaagaagatgcggtacgtgaattattaaagcaacaaaagtttcagtgtatggtatgtcaaaaaatgtatagaaaatccatttttagatccatacaatttcctattggtaaaatatatgaggatgtagcgataggattaccaacgtttttacaagcggaaaaagttgttgtagacggaaaatctaaatataattattttcagagaaaagatagcattgtgaatacaaagtttgatcagcgtaaactattctttttggaatgttgtcaagaaatcattgattattcgaattctcagaataaaaagtatgatatggaagcgcatactttttatttacgtgcattaatgatgtttacactgcaattatatcaaataaaggaaaagaatgaggagactactattgattatctggaacatgaaataagaaaatgtaaaaaatatatttggaaaaattcgtgtttagatttaaagaaaaaaatagtattgtttttaatcagtatacaatttcctagaaaaattcttgtagaattatggagtggaggaaaaagatgatatggaaattgtaaaaaaatttaagaagataataaaaaatacaacaccaactacaatcatcaaaacaaaccttatatttgctttgatagaaaggtttttagtacaagtaataggaatgcctagtgcaattatatatgtaatcgatcttttgaacttgtggttgattgtttggttatggaaagatagagaaaagtgtaaacagtattttggattattaaaaatatatcttggaattattcttgtacttgttattaccggatgcgtttattatggagaatggggaggtaatgttgcatctacagcaattgaaattagaaatattgtaagattccccatcttctttttagcatgtgttatttttctaaacaataaagaagtaaaaaaaatatataaggttttagtcatattttttgcaattaatgcagttgcaattttatatcaatatttcacatttcatccgccgggagtatggatgcggggagacatgttaaatggtctgtttggaacggagacaggtggaaatacttttgttaatgtaattttgctagtagtaataacctatatgttggtatgttggagcaagaggaaagtttctacattggttttctttggcagcgtttgtataagtcttttaatctctgctttgatagaactaaaagctttttttattgaagtaattgtaatatatggatggtatcttataagaaagaaaaaaagcagaaaagaaaaatatttaaatatatttctgattgcagctgcaattatagtgagtgctgtaggactgcagattatgtatcgagaatatccgtggtttagggaaacaatgtctttgtcaggtatgattggacaattgacaggaagtgggtacacaggcaatggtgatcttaacagatttaccggaatatttactatagcttctgagatttttgacggaaatcctcttaagatattatttggaattggagccggtaattgttcacagtctgcagttttgggaagttcaactttattttataatcagtattttgagacacattataattggttttcagcaacatacctgtttattgaaggtggcgcagttgttttaattctatatttaacaacatttgtttatttgttttttaaaaagaaagagaataagcaatatgatttaaactcccaaattatgtgtatgttggcagttttccttgtcttttatggagaagcattacgtacggacgcaggttattttgtgtattttgcattagcggctgaatttataaagcctgataaaaaaattaatgttaaaggtttgaaaaaaatggcagatgatattcaagtatctgtggtatgcctggcttataatcatgaaaaatatattagagaatctttagatagtatattaaatcaagacacttcatttaaatatgaagtgattgtgcatgatgatgcatcgacagatcatacagctgaaattattagagaatatgagaaaaaatatcctgataaaatagtggcaatttatcagaaagagaatttatattctaaaggagtagcaattattgaagaacaaatgcttgataaagcgaaagggaaatatattgcattatgtgaatgtgatgataaatggacagatagtagaaaattggaaatgcaatatgattatatggaggcacatccagaatgttcgatgtgtacacataataccattattcatgatttgaatcatttacaaggagacaagttgttcaatcaatgggaagaacagcatattcttacagaagtggaggctttcatgggatggtgcgttcatacttctgctttttttgtgagaaaagaaaatgcgtatcgcccaaaagaatttagaaaatattggtttggcgattatgtcagggtaacaacggcttatacggagggaaaagttgtttctttaccatatgtgatgtcgcagtataattatggtgttaaaacaggagctttgtattctgctgatcatgatgatttgcgagcaagaaaagatagtgtattatctcggaaagaatatcttgaaaagttaaatgcatggagtatgggacgttttcagcagattattaatagaagaatccttttaacggaattagaagcagatagtttgcatgagagagacatattgaactattcgaatgataagaaagagatagtaagtgcggtaaagcaaatcgttgaaaaggtatcttataaaaactatatttcatctttaactggaattgggaaaatgaaagaatggattagatataacgggtatattctatatccattatgggttaagatatggagaaaatgacagttatttctaatttggtatggcgatttgcggaacgatgtggtgcacagctagtatcttttatagtttcaattgttcttgcacgtattcttgcacctgaagattacgggacaattgctctagtaactgtctttacagctattttgcaggtctttgttgacagtggtttaggtacggcgttaattcaaaaaaaagatgcagatgagatagatttttcttctgtattttattttaattttgttgtatgcttgattttatacttgggaatgttcgcggcggcaccgtttattgcagatttttatggtgatgttacgcttgtacctgtgattcgaattctcagcttaacaattgtaatatcgggtgtaaagggaattcagcaggcatatgtatcaaggaatatgttgtttaaaagatttttcttttcgacgatcggtggaacgattttttcagcagtgctgggaattgccatggcgtatgcaggatttggaatttgggcgttagtcgcacagcagttgtctaatacattcatagatactcttattttatggattactgttaggtggaggccgacaaaatcattttcatggacaagattgaagtatttattgtcatttggatggaagttgttagtttcatcactgttagacacagcgtataataatcttcgcaacctgattattggtaaaatgtattcatcgtctgatttggcattttacaatcagggagataaattcccaaaggttattgtaaccaatattaatgcgtctattgacagtgtattgctgccgactatgtcgagcgctcaggacgataaagagcgcgtgaagcaaatgactcgcagagccattaagacgagtacctatgtaatggcaccattaatgatggggcttgcgttttgcgcagaaccaattgttagtctggtacttacggataaatggcttccatgtgtccctttcctgcgtatcttttgtattacatacatgttttggccggtacacacagctaatttgaatgcaatcaatgcgatgggacgcagtgattggtttttgaggctcgaaattatcaaaaagataatggggatgacgattttattgtcaacgatgtggtttggtgttatggcaatggcttatagcttattattaagtagtgtgttgagtcagatcattaattcatggccgaatagaaaactcttaggttatggttatctggaacaggtgagagatttcgcaccgggcatcttgctggctgtgattatgggaatttgcgtttatttcatcagttttctgcatttatcaacgattgtaacattgttaattcagtttattgtaggtgcggcaatttatatcggcgtatcagcaatattaaaattagaggaatttgagtatttgcttggaatggtaaaatcatttttgaaaaaataaggaggtttgttgttatgaataataaaattcttgtgacacgctcatcaatgccaacgttggaagagtatatgaatgaaattgcacccatgtgggagagtcattggctgacaaatatggggccgaaacataaagagcttcaagcaaagttatgtgaatatcttgatgttgagaatatagatttattgacaaacggtcatatggcattggaactcacgcttcaggcgatgaatttacagggagaggttattacgacaccatttacatttgcatctacaacacatgcaattgttcgtaatggtctgacgccggtattctgtgatatagatccggaaacgtattgtatggatgcaggcaaaattgagggattgattacagacaaaacgtgtgccattatgccggttcacgtctatggaaatatctgcaacattgaagaaattgaacggattgtccataagtatgaattgaaggtaatttatgatgcagcacatacatttggtgaaacttatcagggcagaggaatcggatcttttggtgatgtttcatgtttcagttttcatgcgacaaaagtatttaatagcattgaaggcggtgcggtatgctataaagatcaacaattgggcgagaaactttatgaattaaaaaattttggtattcatggtcctgaagaagtacctgcagttggtgcgaatgccaagatgaatgaattctgtgctgctatgggaatatgcaatcttcggcatgtggatgaagaaattgcgaagcgtaaagcggtggtcgagagatatcgtgagcgtttgaatggggttgaaggcattcagttgaattgcattcaaaaggatgtaaaaagtaactatgcctattttccggttgtatttgaggaaaagttatttggctcaagtcgggaggaagtatttgataagttggctgaaaacgatgttgttgcaagaaaatatttttatccattgacgaatacatttgaatgttttcacggaaaatatgatgccacgaagactccggtcgcaatgcatatcagtaagcgtgttttgacactcccattatatgcggatcttgcgttaaaagatgtagacagaatttgtgatattattttgggctgtaaatataaatagacggaggaaagtataatgaaaaaattgatggttttgggaggatccagatatgcccttcctgtaattgaggcggctcatcgtcttggcatatatgttattacctgtgactatttaccggataatattgcacataaatattcagatgaatactgtaacgtcagtattattgatcaggaaaaaaccctggatgcagctcggaagctaaatattgatggtattatgtcttttgcctgtgacccgggagttgtaacagcagcatatgtagcagagcagatgggacttccgaatgtaggaccttatgagtcggtgtgtattttgcaaaataaaggaaaatttcgtgagttcctaacaaagaatggatttaatgttcccacggccaagggatataagaatgctgcagcggcgcttaaagatatagagatgtttcattggccggttattgttaaaccaacagattctgccggaagcaaaggcgtgaccagggtggataaacctaaggatttggagaaaagcattcgatatgcattatcatactcgcattctgatgagtttattatcgaagattttattacacaacatggttattcgtcggatacagatagtttttctattgatggagaacttaagtttgtatcctttaactgtcagagatttgatcgggaagcaaagaatccatatacgccggctgcatacagctggccctcttctatgacagcagaacatcaagaagaactgaaaaacgaaattcagagacttctgaagctgttgaaaatgaaaacagccgtttataatattgagacacgtgaaggaacagacggcaaagcctatattatggaattatctccacgtggcggtggtaatcgtttatcagaatgcctgcgttatgcgacaggggtagatatgattacgaatatggtgaaatatgcagttggattaccggtagatgatgttgaacagaggccgtatgatgggtgctgggctgaaattattcttcacagtgataaacctgggatatttaaagaactatggatttcagatgacattgcagataatattgttgagagagacctttggatacaagaaggtgctcatgttggtgggtttgaagccgcgaatgaggcgattggcaccttggtactgaaattggaaagccaggaaagaattgaagaaatccttggtaatcagagtaagtatgtaaaggtaaaattggcataaaagattggggaaatttgtacatgaaaaaaattgttgtttttggggctagtggtgatacaggacagtattttgtcagatatttcttagagaattataaaggtaatgaatatcagatcgttgcaaccggaacccgagagacggattgctttaaaaaaatgaatgtttcctattatcaggttgatattacaaaaaaagaagatttttcaaaattgccggaaaatgtttatgcagtggttgatttggcaggtgctatgccggcaagaatgagagggtataatccatataaatatattgatgttaatattattggaaatttaaatatcttggagtattgtaggaaaacaggggcggatagaattttatttgcgcaaagctttggagacattaaagattatggagagaaaaatccaatattaacagttgatcttccacgcaaatttagttttacaagtgatcatacgatttatgttatgacgaaaaattttgcagtagatatgatagagaattattatcaaatgtatggattaaaaagatttatattccgattgccaacaatttatttgtactcacctattgataccttttatgttgatggcgaaaaaaggaaaattggttatcgtgtactcattgatcatgctgtgaagggagaacctattgaggtatggggaaatccgaatcgtaaaaaagacatggtatatgtgaaagatttttgccagatgttatataaagcaatttttgtaaatagagattgcggatattataatgttgggacaggagtaggaacatcattgttagatcagattagagggatggttgaggtgtttggagaaggtgataaaaaatctcagataattatgcgaccggataagccaaatgctccccaatatatcatggatataacaccggcaatccaagagctaggctataaaccaaagtataattatttagagatgctgcgtgatttcaagagagaaatgcagtatgcagagaatgtaggtaggtaatttcaatactttaatggaaatgaaatattgaaagagtaagcgccaaataatgatgcggattgcggactaatctttttacatctacaattagagtaaattactacaagatggagaaaaaattatggcaggcactcgcaaaccttgtcttccattacaggaataggtcaagctcatcgacgaatatcgcaaaagcggcatgacagatgttgactggtgtcgtgaaaacgatatcacacctagcactttttataactggtcagccgatgctgtaagatgtggttgaccagattccatagccttcttatgggcattcaagaacacattatcccaaagaggatgttgtccctgattaaaatttttaatttcgttgacacagaggtatgttaaagtatggttttttatacgaaaatattttcagaagtcaaatcaatataaaaataaatgcataaaagttaaagaggaagctgacgcttaatgattttttaatcgttaaagcgacagtctcttgcctctttgaccaggacacccatgcacttgatcagacccacccaccacatccccattacatcttgcctaaaaaatattttcacccatccatctgtaattctttttataaaattaacgaatgttaatttctcacccattttcatctaaaaattccatattagtggttatttttctacaaaagctctcaaaaaaagccatccttgcagttgacaaaaaatgattgctcgatataatagatatgaatatacgttaaatatgagaaaatgaggttcagtatggagttttatgatattcattcccatatactagcgaaagtggacgatggagccgagacttttgagatgtcatgccagatgttggacatggcgtatgaggaaggtatacggcacttatgcgtcacaccccattacaacagacacaatgcggatgatgcagagcggccgaagaaggtcatgcgggcttttcgggcattggaattatatgcgaagaagcagtatgaagacatgcatctgtaccggggcaatgaagtgatgtatttccctgatatggtgaaatatctggatagcggcagtatcacgactatgaacggcggacgttatgtgctggtggagtacaagccgaatgcttcttatcataatgtttacagtggtctgcagcagattctgtatgggggttatctgccggttctggcccatgtggagcgtctggattgcctgattgatgaatgggacaagttagaggaactgaaggagagcgggattattctgcagatgaataccgatggcctgataggcgggcgttttgaccgatgggtgcgccggtgtcgggcactggtggaggatggctatatcgatgtactgggaaccgatgcccacaatatgacatcgagaccgccacagtaccggaaagctgctgaatggattgagaagaaatgcggtcaagcaagactcagacagcttgcagaggagaatccgagggcaattctggagaatcagctcatcagcacctgatgtcgaaaacgacagaattcgacacccgcagcctatcaacacaacaatttaaagaatggaaagtagtagtaagtagtaatggaaaagaaaagaaatgacaatgaagagatggaaattgatttactggaactgctgatggtgatgaagaagcacctggcggcgattctattggcaggtattgttggtctggtgatcatgtttgcctgcacaacaattctgatgacaccgttatacagtgcatcttccatgatgtatgttatgccggataatagtaatagtaattcctctactctgagtgatatgcaggttggtcagcagctgacaagtgactattccagcatgatcgagagccgcagttttatggaagatgtgatcaagaagctgaatctgacgatagattatcagcagcttctcgaaaaggttgaggtgacgaatccaacatccagccgtatccttcaggtgacggtgaatgatccgaatccgcagacagctgcagatattgccaatgaagtggcttccgtggctgagtcaaagctgaaagagattaccggcatgcaggcgattaagatttatgaagaggcggctgtgcctgagaaaccatccagcccgagtttgaagaagaactgtgcattgggccttctggcaggtattgttctggctatggcagtcattacagtactttatttgatggatgatactattaagacagaagacgacattgagaaatatctgggtatgacaacattggcagtgcttccttacaatggtaaaaagcagcagcgacatgctaagaagcagaagaagcagcgagcaaagcaggggaaacagacatccagaaagagaaaggaaatcgaaactgatgaattcaattaatctgacaagaatcgatgacggcgaagccgtcagcgaatattataaacagctgagaacgaatatctatttctgcgggcaggacaaacagtgtatcgcttttacgagtagttttcctaatgagggaaagagtacggttgtattcaacctctgcaaagcactggcagaggacggtaaacgtgtcattcttctggatgcggatttgagaaaatccgttttatacaatcgatgtatgccggatcaggaggtcaagggactgagtcattatctggcaggttttgtgcccctcaatgatgtgatctgcaagaccaacatcaagaatatgtatatggcatttgcgggcctgaatgccccgaacccggcggaattattgggaaatccgaagttcaaggcagccattgaagcaatgaagaagagttttaactatatcatcgtggactgtgctccgatcggcgcggtgattgatgcggccgttgtggccaagagcgtggacggcatggtgatggtcattgaacagaagaaaatcagccggagaatggcacagaagatgaaagaacagctggaagccagcggctgtccattactgggcgttgtattaaataaagtcaagatatctgagaataagagttacggcggctatgggcagtattatggccactacggcaaatacggagagtactaatacataggataacggtacatagaatatagaacatgaatacatagaacacgaatatgcagatataatctgcagcaattcctattacgcaaaaacgctgcgctttctaacgcgcagtgtttttgcgggcaggaagaagtgcctatcacaggcacataacaagactaaaagagggaataagtagtaatgcagaacaaaatcaacagcaagatgatcaacaaccgtaagtctctgattcaggatgactatatcgagaagtatctcgcagagaaagaactgaatttgactgcaacgctggatgctaagaccgcatacgccgatgctgattttgttgtcattgcggcccctactaatgtctactcaataaaatcagtcgcggtctgatggtctatggtggagttgaatatacatacaaatatacacctttttgcataaatatacgccacattttactgtgaaaatcatgtgttgagtagtaggccgttaataatgataactgcatttatctgcgtgtcgttgagtaacggtcaaaaactactaatattccgttgtgcaaacatcataaaagatgactaaatcattgtgcaggttgcgataagaatgattgggctgtttgtatgattattacaaaaattctggattgggaataattggcaaattagatacagaaaaacaggtctactcaatgacataacactttgatatagagggtggagaagacggcgaataaatatgcgccggggaaatgtagtgaaaagttcgactgattttattgagtgaacctgtctggatgaagatatgtagagaagtagagaaaaaggccgtgtgatgaacaaacgggagatttagagagaaataccatccgatgagggtgtgtagatagatgaaaatctggggacgaaggagtttagaggacatgaaagtatgtttggttggttcgtcaggaggacacctgacgcatttatatatgttgaagccattctggaaggacaaggatcatttctgggtcacttttgataaggaggatgcaagaagcctactcgaaggcgaaaaaatgtatccgtgttactatccgaccaacagaagcctgaaagcccttatcaaaaacacaaagattgcttggaatgtattgcataaagaaaagccagacttaattatttcctgtggtgcagcggttgcggttccgttcttttacatcggaaagatgatgggagcaaaactggtctatatcgaggtttttgatcgaattgataagccgacaatgacgggaaagatggtttatcccattgtggacaagtttgttgtgcagtgggaagaacagaaaaaggtttatccaaaggcggttaaccttggcagcatattctaagtaggggacgagaaaatgatttttgtgacggtaggaacacatgagcagccgtttaatcggctgattcaaaagatagatgaattaaagaaagatggcacgattcaggatgatgtgattatccagacgggcttcagtacatatgaaccgaagtattgtcagtggagcaagttaattccataccagcagatggtaaaaaatgtggcggatgcccgtattgtgattactcacggtggcccggccagtttcatcatgccgctgcagattggtaaaactcccattgttgtgccacgtcagcatcagttcaatgagcatgtaaatgaccatcaggttgagtttgcgaggaatgtggctcagagaatgggaacgattatcccggtagaagatattgaaacattgggagacatcataacgaactacgatcaaattgttgctggcatgggacatggcatgagcagtaacaatgccaagtttaatgaagaacttgagaaactggtagacgatttgtttggtggggaaaactgatgaaagaattactaataatggcaaagtcactaggtggcggcggatctgaagtggctttgatagaattaattaatgcacttcccgaagaactttacaatataacacttgtattgcttgattcggacaatgaatatgcttaccgtctaaaaaagaatgttaatattgttcagttgacttttaatagttcttttgcaaaatcactggtttcaatgtatgcttttccggcaaaggtattgaaaaaattatcggttaactcatttattccatattatgattttatttcgaattgtgtgacgaatgtttttgaaaagacttatgacattgctattgacttctatggatatggttcatttgtgacagctttcttggcgacgaaaatacaagcaaagaaaaaggcaacatggcttcatgatgaaaaaccatactggatgaaaagcgttcaaaaatacttatgcgaatatgacaagatttatggcgtgtcccaggcagttgttgatgcattttgtagagagtatccgcattataaagataaggctgccgtattttataatgtaattgatattgaagaaatcaagcgaaagtctgaacaagatgagataataccgttcaaggaaagctttaatattgtaactgttggtcgattgacagaacagaaaggctatgacattgctataaaagcagcaagcattttgaagaagaggaaaatcaattttgcatggtatgctattggtggtggcagagatgaaaaaaagctaaagaaattagtggagaagtactgtctggaaaatcaatttgtgtttcttggtcgtaaaaaaaatccatacccatatatgaagcactgcgatttatatgttcaaccatctcgccatgaggggtatgtaattactttggtagaggcacgtgcattatgtttgccaattctgtcttcggacattccttcagcaagagagcagatacaagatggtatcaatggatacgttgttgaactgagtgcggaagatctggcagataaaattgagtacttatataacaatccttctcaaaggaaaaagactgttgagtatttgaaagaacatccgattgatttctctacggagttactaaagctagaaattatttgaaaagagattgtttatgagaaaatttaaagtagtaatgataacttcatactttgatagaaatggagtaacatcccaagtaataaattatgctacaaacttggacaaaaataaatttcaggtagcgattgccgctggagagccttatgacatcggctatgaaaaagcatgtcaagagaataatatagaattgtgtaagctgccacaaaaacagaaaaatgcatacatgtattataagactatttattcttttctaaaaaaaaagaaaccagatattgttcatgtacatggtagcagtacattaatcgccgtagaactttttatcgctatgttagcaggcgtacctgtacgaatttctcatagccataatacaacttgctcacatccgttgttacatgagacgctaaaaccgtttttgaaagtggtgtcaaattgttatttagcatgtggcgaacttgcaggaaagtggatgtatggcgacggagcatttaaggttataccgaatgcctttgagacagaagcatttgctttaaattcagagactagattattaattagaaaaaaactagaggtgggcgataatttagtaattgggcatataggcaaatttaacaaccagaaaaatcaaaattatttaattcgcgcctttgagaagctgtcatatgaagatgataaagcaatactgcttttggtgggaaatggaccagatttggcggagataaaaaatcaggcacagcatacagcatgcgcagaccgtattatcttttggggagcaactgagaatccggaatatttatattctgctatggatgtttttgctttaccctctaggtttgaagggttacctgttgtgcttctcgaagcacaaatttcaggattgccttgtatcgtgtcggataaagtaacacgagaggttgattttggggatattatttggaaatcaatagaggataatccacaaatatgggcagatacaattttatcaatggggcaaagaacagaagaacagagaaagcaatattgtttaaaacatgcaaaacaaattgcacagtatgatattcaagaatctgcaaaaaaggttgagaatatttatgagcgtcaactgcaaaaaaagaaaaagttgttgtaaattattggtaaaaatcaatggctgaatgaatgcacagaaacggggtatgcaagttgataaagcagccttatatagatgaattattttacctattagaagtgacaaagcattcaaggaattatttaattgttcaccagtttacgaagtgcaattttataatggcttattatgagctttttggaaaaagtaaatatgtaaataccacttctgttataaaacaattataatggaaacctctgttttttgtcgtatttgtttgtgacagattagtaaggagaattatgaagatacttcacaaaggttgtattggtttagtaagtgcttggaaagtgttgtgtgccaaaatttgtgcttgtggaaagtttcaagcaacatgggtcaattctattagaggagcgcttaaaattgaaattataggcaatggatgtattgcagttggacatttcttgatgtcaagagggccgctttatctaaaatctgtgaatggtgggaaaattactattggcgaaaatgttttttttaatcataactgttcacttacttgtgcggaaagtattgtgattggagataattgtatgtttgccaataatcttgttattattgaccatgaccataaaattctaaaagacggcgtgactggagcgcttgtatcagagcctatcataattgaagagcgtgtttggtgtggagcaaatgttacgataacaaagggtgtccatattggaagaggagcagtaattggagcaaatgcagtagtggtaaatgatgttaaagcatattcaactgttgcaggcgttcccgccaagaaaattaaataacacaaaatagctgaaaaaataaaattagaaatgatgatactttcatgagtagaattcttctcaccaatataacaaacatttctgaattttgaaatggcagatcattcgacaaaattgagtagacttttgaaaaaaagttttcaggtatatattatgtgtcaatcgttggcgccttaacggataaatgaaaatatgtaatagtattttcttgtcgctatacagtcctgctgctcaatacatatgctgcgtagtgtgacaatcttataggaattatattgagaaagaagatagtttggaaaagcgaaaggcggtcaggatgtttcacgatacattgataccttttgcagaaagatggattataaatatgaaagaagaaataacagtaatagttccggtttataatgtaaaaccgtatttgcggcaagcattagatagcattagagaacaaagctattccaattataaaatgattgtagtggatgatggatcaacggatggatgtgcagaaatttgtgatgaatataaagctgctgatcctcggatagaagtagttcataaaaaaaatggtggactaatgtctgcatgggtatgcggattggaacaggtaaaaacagaatttgttgtgtttgttgatagcgatgactacatagctgttgatatgttgcagatttttatggaaagtcagagaaaaaacaatgcagatgtggttatcggaaattataagtggtttaatgaatccaatatggtaagggagaagaataaacacaaagctggattttactcaaaagaaagaatgttaaaagaaatttatccgaacatgatcaatgcggggaaatttcagagcagaggattagtattatcacgatggggaaaattgattagaacgaacttgattcgtgaaaatctcaagtactgtgacctaagaatctcatatggagaagacttaaatataatgattcctgttttctgtgattgcaattcaatagaaattgtagaagagcaaagttcggattatcactatagaatgaatccacattcaattcttcatacatataagtcaacgatgctccagcaggtcgaattgctatatgaaaaattaaatcaggcagtttcagacaaaaggatggactacttaaagactcaattgcaggcagattacctggcagcaattgtacagtgttttaagaatgagttatcgaatactaatgggaaaaaagtgattgtaaataatatagaacttatgggtgaaaataaaaaggtgaaaaaagcaatatctgaagtggattggaaaaattatgaattgaaaaataaagttataatatattccttgaagcaccgaaattttttcacgagggattttttgataggaattttgcaacacatactttgcaacacataaagtgattttatttacatcaaactaatagaggacttatatgaataaagaattttcaataataataccagtatataatgttgcaaattatttagataaagcaattgagtcggttctttcacaaaatattagtgcagatatgtatgaaataatattggtggatgacggttctacagatgccagtggagataaatgcgatcaatgggaaaatagattcccgactttaattaaagtgattcacaaaaaaaatgcgggtcttggctttgcaagaaattctggactggaggtcgcatcaggtgagtacatcatatttttggatagtgatgattactggattgatgatgatgcacttaggaaatttgaaattaagataaaagaagaaaaacctgacgtcgtcgtttttaaaaattgtatctacgatgaattgacaggaacttttaaggagccaaaaaaagatagagaatcagaaattgcgttggaagatgcgataaagctagagtactttgacttttctgcatggaataaagctgttaaaaggtcgctacttgtagataataatatagcttttaaaaaaggaatatctgaggatatgctttggagttataagatccttttgtactctaagaaaatttctttctgcctagaaaaaagtgtatatgcgtatagaaaaggacgaacaggatctttgaccgcacaaaaatgtgttacatatagagaagaatactttaagatattagatgatatcggaaacttaatgaggtctaatgaaaatattaaggcggcagatttatatgcttcgatggtatatataactctttttagatatctgagaaatagtttagacttgagcgaacaggatgtggatttcgtgcaatgtttgagtaaaaataagagcatgcttagatgttgcgcaaattggaagatagctattatccggtttatgatttatacgctaggagttaaaaatacaattgcaatgtttagaaagataaaacgttaatcacatttcagagaaagggaaaaaattgaaggtttatagatataaaataataagtgctttggtgcttcttttatgcgtcgatgtcacttatctgaatgaaatatttcatagacttccaacaatacagtactatggacgctgcgtagtacttctatatatgctacttgattgtgttagatatagacgacatttatcaaaaatattaaagtgcatatttgtttttgtactgtgggtattaggaattacatatattcgtgggggagaattaattgaggcacttaaagtcttttcttcaccgctgctattgtgtgtttatattgacaaaaaacgaaattcgacccaattatatggatacttagatacatggaaaagcgtgctgcttgtttttgtttgcatcgatttatttacacaagttctttttccacatgggatgtatagagacacaatgtactccttaaattggttcttaggatataaaaccgcaagattagcgttttcattaccattgtgtgtactatcctcaattgtggatatgcataatagaaaacggttaacatggaggacatggatatgttatgctctttcggttgaaacactattttattcacaagcgacagcagcatctattacaattctgattgtagaaatattgattgcattaatatgtattaaccgaagaggaaaattcacagaaagagtatgggaaaagctacttaatttaaaattcgttttggcaatatatgccgttatttcggttttggttgtgtatgtacaaaactcgccacaaattcaatatattttagtaaacattatgcataaagatcctactttaactacaagaacatatatttggaacttgtgcattgagagcctggcaaagcagccccttacagggctgggatacttgaattcactaaattatcagaatttaacaaacaatatgtatgctacttcagctcataatatgtcgctttcaattctgatttctggtggattcataggcttggccatatatgtaattattataatcgttgcatggcagagtttcaaaataaatatatcgattgaaaaaaagattacaagtattgctataattgcaattttaataattggaatgacgtcatcttctatggtgtttagttcctgtgcttttattttttatgaacttatggcaatattggatatgcctcccttaaggaaaaatttcaatataaaaagtggtgaagattaaagaaagttggatttaaagtggataagaaaatgcaaaacaaggtgtctattattgttccagtttataaagtcgagaaataccttaataactgcatacgaagcattgtagaacaaacgtattctaatctggaagttatactgattgatgatggatcgccagatggttgcccacaaatatgtaatgagtggcggcaaaaagatacaaggattaaagtaattcatcaagaaaacttaggagttagtgctgcacgaaatagggcgattgaatgtatatctggcgagtatatattatttgttgattctgatgactggattgcaaacaatatggtcgaagtgttggtgcatggaatggagtcatcagaagatgttgatgctgtattttgtggatatgttgaagttgatgaagatgataaccttatccgaaaagttatgccaaaacataaggaaattgttaatcggaatcaaggggtagaattgatttttggagaatatgggacttttttgtggaataagctgttccgtgcaaagttgattgggaataattcattatttgatcgagaattaaaaattggagaagatgagctgtggatggttgatgtgctgaagaagtccagaagaatccttgcgattgacaatcctttatattattataggcgaagaatggatggagcatctaacgattatgctttgagttccaaaaggttatctgagattacagcacaacagaaaacattaaaaagcatagttgattataggtctgatactttaattagtcttgttgaatgtagattgtattactgtgggaataaaatcatgagattggcctattaccagaaacaatatgatatatttgacatgatagattcggaaattgaagaaggaagaaaaatatggtataagacacatcataatcatttaggaaattgccgtagaagaatggtggaagttatgatgcgggcgagagtcccacaaaaaatagtaaggattctggataaaaatgatatgatagagtggaagaggtgatagaaattgatttatctaaaggcttttttagatgaaaacttgggggatgacttatttgtacaaattgttgcgcataggtatccaaatagtgagttcctgctttttgcaagcgacgaatatcctgtgaactttggcaataatgtacatttcacattttcaaaagactcatataaagggctggaacagaaaataaaattatatgacaacagaagaaaaagtagattacaaaaaaaatgcttcccaattttttttagaccagatcataaagaagaaagagctattgtaaagcatgcagatgcaaacatatatgtaataggttctggatttatggaaggcggaaaaataggaatttggagcaaattggaagaatggctttattataagaggaagccatacattttaggatgcaattttggtccttttttttcaaaccaatataaaaactattatgaaagactatttgcaaaagcaaacgatgtatgcttcagagaatcatattcatgcgacatttttcctgaattaaaaaatgctagatgggaaagcgatattgtattttcctataatggatatgtcgatgaaaaatttggccgaaataatggaaaatatgttgttatttcagtggtcaatttagataaagacggagcgaagaatcagaataaagagggatactatagatttattcttgaaattgcaaaatatttctgtgaacggaaaacaaaggttgtgtttgtaggattttgcaagaatcaaggggatgatgttgcgatagaaaatatcgtaaagaacattcggcctgaattccataagcaaattgaaattattaattacccacaaaataatatgttttatattttaggtgtgtttaaggatgctgaggctgtatttgcaagtagatatcatgcgggaattattggaatgttatatggacggaaaacatacttcctatcatatagcgataaaatggtaaatgttctaaaagacattgatgaaaaaattcggtatataaatattaatgaagaaattaatgttgacgtaaatgaatttattttgcaatatggatatgaaattttaccagcgcggttggatgaaataaaaaaatctgcagaacgtcagtttttaaaacttgattcgttattaaaataataggtcaggagaatgtatgagatataaaggcatacggagaaatacatgaaaattaatagaacagaaaacgcagttaggaatatactatttggtggaatacttcgtgtttatcaaattgtgattccgtttgttatgcgcaccgtcatgatatattgtatgggtgtgcaatatttgggcttaaatagtctttttacatcaatactacaggttctaaatcttgcagaactcggtgtcggaagtgcaatggtttatagcatgtataaacctatagcagaagatgatacagatacaatatgtgccttaatgggattatatcgaacttattatcaatgtattggcttgattattgcagtgattggagtgggattaacaccttttattcctaaactgataaagagcgatcttccggttggtataaatatttatgctctttatttattgaatctttctgcgacggttttgtcatattggctatttgcttacaaaaatagtctattgcaggcgcatcaaagaattgatgtaacgagtaaagttactttgataacgaatacttttcaatatgtggtacaaatttttgtccttgcggtgttaaaaaattattatatatttgttgttgttatgcttctgacacaggcaatgacaaatattattacatcaatagtagttacaaaaatgtacccaaattataatgcgagaggaagattgtcaaaagaaatagtcatatcgattaatcacaggatacgagatttgtttacatcaaaaataggagcagttattgtaaattctgcggacacaattgtcatttccgccttcttgggattgacaatgttggcgatttatcaaaattatttttatattttgtctgcgattattagtattggtacaattgttttctcggcttgcacggctggaataggtaatagtttgattgttgagtcaaaagaaaaaaacttttatgacttgcgtaaattcacttttatggtggcgtggttcgcaggtttttgtacagtatgtttgctatgtctctatcagccatttatggacatttgggtgggcaaggatcttgaattagagtttttggcaattatctgtttttgtgtttattacttcgtctatgaaataaaccagttattgaatttatataaagatgcggcaggcatttggcatgaagatcgttttagaactttgattactgcattttcgaacctcataatgaacttgatcatggttcaattttggggtatttatggagtaatactttctactgttctttcaactgtatttattgggatgccatggctattacataacctatttacggtattatttaataagaaccagcttgtgccgtattttaaaagactgatgatgtatgcagcggttacagttgctacatgtattataacttatggaatttgtacaacagttaaactaagtggatggactttattagtaatccgattgataatttgttgtactataccaaatataatgtttatgattttgtatcgaaaattacctgaatttaaagatagttttgctatgataaaaaaaatactgaaaaagaatttgtaagaagagaggaataatatggaaactagtatacttatcatggcggccggaatcggcagccgatttggaacaggaataaaacagttggagccggtggatgattctggtcatatcatcatggattactcgattcatgatgcaatcagagcaggcttcaatcatgtagtatttatcatccgtaaggatatcgagaaggaattcaaagaggtcattggtgatcgaattgcctccatttgcacttctcacaatgtaactgtggactacgcttttcaggatatcaatgatattccaggaactctgccggaaggccgtacaaagccgtggggaaccggacaggctgtgcttgcagcgaaggaggtcatcaagaccccgttcattgtgattaatgctgatgattattatggtaaggaaggcttcaaagctgtccatgagtatctggtgaatggtggcaagtcctgcatggctggttttgtgctgaagaatactttgtctgataacggtggtgtgactcgtggtatctgcaagatggacgaccagaataatctgactgaggttttggaaaccaagaatattgtaaagactgaaactggagcagagacagatggcgtggctgttaatgtgaattctcttgtctccatgaatatgtggggattaacaccggagttcttggatgtgttggaagaaggtttcaaagagttctttgagaaggaagtaccgggcaatctgctgaaggcagaatacctgattcctatcttcatcggtgaactgctggagcagggcaagatgtctgtaaaggttctgaaaaccaacgatacctggtatggtatgacctaccatgaagatgtcgcagccgtaaaggacagcttcaagaaaatgctggagaacggtatgtataaagctgatctgttcagtgatctgtaaacaacgatgaaagaaatgattgatttactcggaaaaatcctcacaaacattctaactgctctttatgagccgtttggattctcaattcttctttcctttctggcaatgtttttctatctgtatgcatatgagcctaccgcagcaggtaaaggatggaaaaacgccatagtgacatggtatcagaaatttaagaagagtgggttctttcggaagctgttcctattggtgtttgtgacttcgatgatcttattcagaacgctactgaaccggaacctgtggatgaatcctctatccaatattatgggcggctggggcatttgggagacagtgaacggcgagaggaagctgactaccgaatgcattgagaacgtaatcatgatggtgccgttttcagcaatagtgctgtggacctttggagagaagataggaaacggctggaagaagatactgtggtatagcggaaagatagcatttattttttcagtaagcattgagatgctacaattattgctttgcttgggaacgttccagctatcggacatcttctacaacacagtcggtggagtgattggtgattggcggattgatgtactacgtgtttatgatacactaaaattaccagaaaaaagcgtcaaaaatccctgaaatcggcaaggaattttcctcaaaaaaggcgggacatattgtatccccttcacaatacagatatcctttgtgtagagaccaatctattcaaaggaggaaaggaagatgtacactatgtcccagatcaatcatatcaaagatttaagtaattgtggataccgaatcagtgaaatttcaaagaaaactggtgctgatcctaaaacgatccgcaaatatctttctcaggaggacttttctccggtaccgccggttgtccagacgcaaccatccaagctggatccttttaagcctgttatccaggagtggcttgatgattttcgcagcttatcacgtctttcgtcggctctcagtgccaaggcatccgccctgtgccctatcttgcttgacctttcgttcccacatcatgtagcgtcatgatgcggtcggttctatttcttcgatttcttttgaaatctgtaaatcttttcttttcgatgatttacggcttgatgtgtttctgatatgcagttttcaaggtacacagcacgtcagggacagagataacaatgtaaagtcccggcggatgggtccgaatcccatggatgttcatcgcacgaagatgctggcggcgtaaacttgccactatccaagtgcagataactatgtaccttgaaaactgcatatcagaaacacatcaagccgtaaatcatcgaaaagaaaagatttttctattttgtatggaatttacccctgcaaagtagaatttacttctgcaaagtagaagttacttttgcaactcacctattttgttttaagttatgttttaagtttcgttaaaaatatctgctgacatttaattcagttcaaacaactggcgctgtttcaagtcaatgctggcccatgaaatattggagttttccttcccatagagataaacggtactcttcactctgacataaagtttgcagctcttcttgtagccattcagattatctgaactgccggtatctctcaaatattgctcaatatcagccacattcaggctgaaggcattattttctgtaatgtcaaaagtatcagcgctttcctcaattgttttgccgtcatagctctttaaagttccgattcggtttgtaatattggttactttttcactctccgacggtgcaccatcagacgaacttcccgcttcactgcttgcttccagcgtactgcccttgtcatcatttataaagaatgaaatctccatcttctgcttgtcaaggtcttcctggttcagatccgcactgaccatattatagtccttgacattgatattgaaggtcatatccttttcaaggatattattctccccctctttccatgaggactggtctgtggcataataacgggcactttcaatatccgcatccggattcagtgtatccacaaagtcaacctccggtttcactgccgtaacattggcagcagcaaccatggcattaataaacagctggatttcttcgtcgccgtcaaccttactatggccggcaccggtataaatcacattacctttactgtagaaatagtagttatttcttgcatcattcggtgactccgaatacaccgatcccgatcccgacagacaataccacacaaccacatctgaagtgccatcgcttcgtccattgatatctctgtcctgctccagcgccagctgctaatactggccatgtgtctttgctacctgaatattattgccaactacatacggatactgggtaatcgcaccatcattaatcttcgtagccgttgttgttaccttatctccgattgaacctttctgcagcatattgttggtatatgcctgggtctgcgcataactgctctcccggcttccatttgtctgccatgcaatatcacctgcaagtgtcatcaatgtaccaaaatcaacactctgactgtttaatgcctttccgtgcttcaataatgctgaaacagtctcaccatttatctgctcagttgatgtaatcccatatctgtccataccaactacagaacgcaaaatagtatttaatgataatccccaggttcgatttctgctaaaaagccagttatcattataaattgaagtgtgttcattattattgccgagttcataatcactgtccgctattttttcatacatatcattcttgtcataattaatataagatgtcgtatcatgtgaaaaaataacactcttacctgatttaataaaatccagaatatcctgtacctgtccattcttatctgaaatatcctgataaacatcatcaaatccgataaccagcatctgcttttcggacaacagtttcttcatttcgcctttgttcatattgttgatttcagtaagtgtttttgtctcaatcttaatctcgaaatcatcaatattttttatcatgctctgaaatttcgaatctgttgccagattccagttgccatttacattgtcccatctttgcgggagaagctggagcacattgatctcctgctactaattttctttttccggacgatccttctttaatgtattgtatatattctgcattctctgatccgtattggcgatcacatccgaacaatccttcaattccgctgcaatactatccggcacatctccttccgtcttgtatttcagctgatgttccagactggcccaaaaatccatggctattgtcctgatctgaacttctaccttcagcggcttgcatccatcagaaaaaaataccggaatctgtacaaccagatgtaaacttctgtaaccatttggcttcggattggcaatataatccttcacttccaataatgtaatatcattctgggaagtcagcatatctgccaccatataaatatcctgcacatagctgcagatgacacggataccggccacatcatgaagattctcctccacagactgcagagtcaccggatagcctcttcgtttcagcttctccaaaatgcttctcggtttcttcacgcgatacttaatataagaaataggattatgactgcgctgcacctgaaactcatcattgagcacctctaacttcgtccgcacctccctgatggcacaactgtacatcatcatcagctgttgaaactgctctgccacttctttgaaagcaccgatgttctccaccaaatccacattttgcaaaatgaccgtctccagatcaatatctttccccactgcgactgtattctcatccataccccttatctcctgttctttattaattccccattatcataacatccaaacatttcccacatgaaaattcggagagaagcagttattcatcttcctctccgaatgtatgttgattcccagtaacaatatcatacgacttatacatatattatatgaggaatattcctttttttcaactgattttttcctttacttaagcgattgaaatgaacacaaaatgcaaatgatgaaattaaatatacaatgtaaacagtcaaactcaaattatattaaagaggaatcctgtttacaaaaaaagaggatgtccgtatgggatatcctctcttctgtcattctattctgttctcacgcttacaattattcagctaatgctgctgtaatgatagccatggagtaaacttcttctgcgttgcatccacgagacaggtcgttgattggtgcattcagacctaacaggattgggccgtatgcatcgaagttaccaagacgctgagcaatcttgtaaccgatgttaccagcgttgatgtcagggaatacaaatacgttcgcatgaccagcaactgggttgcctgggcattttgtacgagcaacacgtggagaaacggcagcatcaaactgtaattcaccttcgattggaaggctaggcgctttttctttcgccatagcagctgctgtacgcatcttgtcaacatcttcacctttacctgaacccagtgttgagtagctaaggaaagcaaccttcggatcgataccgaaaatacgtccgcattcagcagattcgatagcgatttctaccagttcttctgctgttggcttgatgttgatcgcacagtcacccatagctaatacttcgttctcacctgtagcagatggacgaaccatgatgaagcatgaagatacgatcttgctgcctggttttgtcttgatcagctgaagggctggacgaactgtatctgctgttgagtatgtagcgccaccaagaagtgcatctgcaacacccatcttaacaagcattgtaccgaagtagttgcctgcggataagatcttgcgtgcttcatccggctgaatgttcttgctcttacgaagttcacagaacatagcgatcatctcatccattctgtcgaagttctcaggatcgatgatctgagcacctctgatattgtaaccatattcttctgctgctgcctgaacttcatcttctttgcctacaaggataggtgtaaggaagttggatgccagcagacgggatgctgcttcaagaattctttcatctgtaccttctgtaaaaacgattttcttcggtgatgctttcagtttctgaatcatcataccgaaaccctgcatattcttgctcatgatatatattcctcctaaatttgtcttttgacaatctcacatatataatttatcactttttttgcagattgcaatgcattccgcgataattaaaaaattaacaaacatgcaaactatttctcaggcttactatgaacacttccaacaaaatttattcgttctcctgtatattttgcacaatattttcaaaagccatactgtgagaagcctttacaaggacagtatcacccggctgaagaagatcctgaagaatcgcttcaagagcttctcttatctcgaaatgtctggcctctccgcctttttcagcagccccctcatacatctcggaggaaagtccacccacacagagaatcagatcaatgcccttctcggccgcatactgtccgacttcacgatgcatggccctctcattctctccaagctcaaacatatcaccgagaatagccaccttgcgtcccggtgccgtcgcaagcagatcgatcgctgctttcatggataccggatttgcattataacagtcatcaatgacaactttatctccggcctcaatcagatgactgcgccctgcaacagcctcaacatggctgatacccgccgtgatttcttccttcgtcatatcaaactgaactcccactgccgctgctgccatagcattgtagatcatatgctcacccggcagagggatattggcatgcaccagcacatcccccatatgaatatccgcacggcttcccagcaatccacgattttcaatatgatctgcccagatggcattatctttgttcataccaaaagttatcggtgctttgccgtaaacgtcatgaattgttgccagcttatcatcatcaccattgacaatcactgttccttccggattcatgaagtcaaaaatctcggattttgcccgaagaatgccatctctgtcaataagattttccagatgacactgcccgatattcgtcatcacacagatatccggtctggccacttcactgagacgatgcatttcaccaaatgtattgattcccatctcaagaaccgcaatctggtcatcatcctgaatcccgaaaatcgtcagcggcagaccgacttcattattatagttgccggctgttttatgtactttatacttctcagcaagaacggctgcaatgaattcttttgtactggtcttacccacactgccggtgatacccaccacccggatattcagctgctgacgataaaaagcagcagcctgcttcagagccataaaactgtcttccacaaggatacacggtcccaagtcctcttccggcaatacttcacagataactgccagcgcaccctttgcaaatacgtcgggaataaaacgatggccatccacgcgttcaccttttgttgccacaaaaatatagcccggttcaatctgccttgaatcgataacaacaccttttgccgtttcctgtgccagatcttcgcgcatataataaatctggccgccgcatgcagctgcaatattctctaaagtcatatttttcatcaatttataccgtttccttcctgttattcatctctcatggaaatatcaatcaataactggcaaagatccgcatattcaatgcccagcacttttgcctcctgaggcagcagtgacgttggtgtcatacccggcagtgtattggcttccaggcagtaaaaatctcccttttcatccatcataaaatccatacgtgcgtaattcttcagacgcagtaccttgaaagcctgctctgctgccgcctgcatggccagcgtcttctcttcactgagttctgccggacatgtttcaatcgtcgatcccgcctgatacttattcttataatcatagaagccatggatcggtgcaatctcaatgatcggatacgctttaccatctacaacacctacagaaaattcacggcccttgatatactgttcaataacgacttcatcatcgtatttaaacgcttcttcaagtgctgccgcatattcttcatcattattcgccataacaacaccgacactggaaccgccgcagcaagccttcacaacacaaggataaggcacctttacatccggtgtttcccctttcttcaatcgaatgccaacgggtgtcggcacaccgcctgctgcaaacaaatctttagaaatagctttattcatgcagattgctgaacttacataatccgtgccagtataacggataccattcagatcaaaacatgcctgaatctttccgttctcgccattctcaccatgcagtgccataaagacaacatccgcctgctgacagatgtcaatgacatgcgggccgaagaaattcttcttccaatccggacgaagtgccttcactgcatcaatatccggattctgatccttaatagcgcctacagaagctgtccagtctacatccttttcaaacacattcttccagtcctcattcgcataacccagaaatacatccaaaagcatgacctgatgacctttgctctttaatgctttataaatacccattcccgatacaagagaaacatctcgttccgtactgattccacctgctaaaacaacgattttcattttaaattcctttctgaatctaccggcatgagcaaatttcttcaatatttcagagaaatgagaaatttgcatctgcctggtacatcacaacaatattattattaaaatccatttattttttttgcatttaataactaaattagcctcttgcacattatacatcgccagccttgccttgtaaagcgaccctttgactgaattttctcccatgagcaatttttatacttgctttttctcagtttacacaaatttccaaatatgttaccatagtatttggcgactaagatttaagagaatcactgataatgcttaaaatatatccctttctgttctctaaacttacgacagactacaatatctgccatcctgctggcagattcgaaatctaggaggatttatgaccaaaacaattgatttactccatggcaaaatcatgcgctcactctgcattttagcagttcccattgtcatgacttattttatacagatggcctacaatttcatcgacatgatctggattggccgtcttggcagcggcgcagtggccggtgtcggcgtagccggtatgtttacctggttttccaatggactggtcatgatggccaagatgggcggtcaggtgaagattggtcactgcctcggcgccggtgacgacgatgatgcacgccgctatctcggcgctgccctgaagcttggcatcgtatttgccctgtttttcggcattggtataaatattctggcgcactcactgatcggcttttttcatctgagcagtccggcagtcatccatgatgctgtattgtatctccgcattacctgcggcctggttatatttacctttatgaaccagattttcacgtcatctttcaatgtctatggggacagccggacaccgtttatcatgaatacatgcggtcttgtcagcaatgtcattgcggacccgctgctgatcttcggcattggccctttcccggctctgggcgtggccggtgccgctgttgctactgtttttgcccagatgtttgtctttatcctgtttatctttgccatcaggaaacgacaccccctttaccgtgggctgaaactggcggaaccaaggccatttcagtattatacacagattatacgcatcggccttccgctttctctgcaggatatgctattttcatgctgttccatgctgattgcccgctttgtcgccgtttacggggacggcgctgtagctgcgcagaaagtcggcactcaggttgaatccctgtcctggatggctgccgacggttttatggccgctatcaatgcctttatctcacagaattatggtgccggacagctggatcgtgtcaaagccggttatcgttccatcatgaaaattgttcttgtctggggaagcctctgcacattactgcttgttttcctcccgggaccgattttcaggattttcctgaacgatgatgctgttttgccaatcggtatcgactatctgcgcatcatgggtttttcacagctttttatgtgtgccgaaattacaacagcaggtgccttcggaggtctgggcaacaccttgccgccttccagcgaaagcatcctgctgacatgtatgcgtattcctttgcttcttattctgacaaaaacaccccttggcctttcaggcatctggtggagcatcagtatctccagcatactgaaaggaatcgttcttgtctcatggtatcttatttatcagcggcgccttttgtccgcatccgcttcatctgctgatatcaggccctgacggatggcttccatccgctcggcttcttcttccggaagataattcagcagataattgcctctctcctgattcttctccagatgctcacggcggatttcgacttttatccgctcgatttcctgccgcaattctctggctgacatcagaaggcacccctgacttcggataatcacctgctcaaggccatctgatgttgccacagttactttatactttcttccgatggcatgggccgtcttttcgatatactgatctgccgtctctgcctcctttgtaaaaacgacatcaatattatgccactttgtcacttcacccggaaatccttccactttgtaggcatcaaaaacaagaatcaccctctggcttgtatagccctgatagttggacaatgtctccatcaacttgttgcgtgcagcgtccatactatgttccgacaattcatgcagatcttcccaggcaaaaatgatattataaccgtccacaagcagatagctttcctgtgcggtcgcctgccgtctgttctcctgctgcttcttttcgcctcgccagctgcctttaccggatgaatcactcaacccacctgtcattttccctgaagagcctgatacttctgaataacttgtatccgctcctctgaatgtacgttctttctgtggctttcgtcgcttaatttcaccatatgttctgacaaaaatagcttccagttctttatcatccgccagagacggtgcaatgcttctgcttctggcagccttcgcttttgctgtcatcaccgtatcctcatcctcagcacctgccgtctctccatccagtccggcgccttccagatgcatataatcttccacttcataccatggcactacaaatcctgcaccatgggcacagaacacagaccccgtcggatttgccagatcccgctccggatcataggctgatgacgccagtacttcttccgtattatggcaaggataatagcccgccattgtacagaacaatcgtcctgtgcctccggtataggcagccacatccttctgatattcacgcatttctgaaacgggtgccattcctgttaatacggctgtttcgccctcattttctccaagttcaaacctgccgctcatcttttcaatatccgtcatggcatgtcctaccagacgctgcggcaattccagcctgaagcggtaataaggttccagcagaacactttctgctttctgcagtccctggcgcaccgctctgtaagtcgcctgcctgaaatccccgccttcggtatgcttctgatgtgctcttcccgcaatcaatgtgatgcgcatatccgtgatcggcgctcccatcaatacgcctctgtgaaccttttcctccagatgtgtcaggatcaaacgctgccagttgcgatccagcatattctcgctgcagacagtatcgaagacaagtccgctgccggcctccaaaggttccattaaaaggtggacttccgcatagtgtctgagaggttcaaagtgacccacaccttccaccggtgctgcaatcgtttccttatatacaatctgtcctgtaccaaattttacttccagtccaaaccgctcatgaatcatctgctgcaatatttctgtctggatctcacccatcagctgcacaagcacctgtcctgaaatatcatcccagacaatatgcagttccggctcttcttcttccaactgacgcaattgatgcagtaccttgtgcagatcactgccctccggcagttcaaccctgtaagtcagtacaggttccaaaaggggcactacctgctcagcctccgctcccagtccgtctccggcctgtgtctgtgtaagccctgtcactgcacaaaccgtacctgctgaaactgcatcaactgtctcaaactttgttccattatatatacggatctgattaaccttttcttcccattcacctgccgaagcatctttcccggataatgtatcctctgcctcacccccggcttcctgtcttctccgtatatggccccggagctgtgccttgaccttcaggctgccaccggtaatcttcatataagtcaggcgtccgccctggacatcccttgcgattttaaatactctggccccgaatatctccggatactgcttctcttctgtccattttgcaatgccgtccaacaactcctgcacccctgtcaatttcagggctgaaccgaagaagcacggaaaaacctttctcccggtaatcattctgcgcacctgttcatccgtcacagttcccttttccagataagcttccagcaccttctcatcgcacatcgccagattctcattgcgtgcatctgcttcttcggaaaaatcaacacaactgtccccgagtcgctgtctgatctcctccatcaaagcccttctgtctgtcccattctgatccattttattcacaaaaataaatgtaggcacctcataccgtgccagaagacgccacagtgtctgtgtatgtccctgaacaccgtctgcaccgctgatcaccagcaccgcatagtcaagcacctgaagcgttcgctccatctctgctgaaaaatccacatgtcccggtgtgtcaagcagtgtatacgatcttccccgcatcacaatttcggcctgctttgagaaaatagtgatgcctctctccctctccaggctgtaagtatccagaaaagcatctttgttatctactctgcccagctttctgatactgcctgtcaaataaagaatactctcagataacgttgtctttcccgcatccacatgtgcaagaatacctaatactgttttactcatctatatcaaatcctttgtttttcattcagtgctttttttattgtaaactattttcccaattccgcaaagtgctaattccctttttctgtatttgtgaaatatttatgaaaaagtatttgaaattccatcaaaaccatagtataatagataggcactggagacgtatcgaagtggccataacgagcttgactcgaaatcaagttgtcgggcaaccggcacatgggttcgaatcccatcgtctccgctatacaaattgaggctgttacctcagagtaacagcctcttttcttttttcaatgctgaatttttcttatttccagtccattatccaccatttcggattttttcaggaaagttttcaaccgccaatcacaatactatacacctttttaaatgtttcatccacattcaggctgttgatacccggtttgtcctgcaattcaccttcatagccgaaattgtcgcatcgtccgcaccacggttccaggcacacaaaaggtgctcccggagctgcccagataccaaaattcggaaatccgtcacataacagtgtcaaataatccgagccatccggcataacaattcctgcctgtctgatttgtccgccgtcaaaaacaagggcatccaggtcaaaaaggtcttttctcagctggtatttgtgatcagtcaatgtcattgtgtaaaccttatccggcaaaccggttcccgtattcatgtcgatatgaataaaatgcaattcatcctgatcctccgcaaacttcagcgcataatcactgtattccgtatccggcagcaccggcacattaaatccgggatgtccgccaattgtaaaatacatcgggtggtcacctgtattctttacctgccactgtatatccactttatctccatccaaccgatgggtgatcatcaattcaaaatcaaacggataaacctttcttgtttctgcattcgacaccagtcgatgggtcacagaagccggactttcttcaactctttccaacacataatctcttgcaaaaccatgctgatcctgcacataatgtctgccctgatacaggtattcgccgccgtaaaacttgcctacattcggaaaaaggatcggtgcctgccttttccaccaggccgggtctccctgccaaatcagttcgcggctatattttttgtcataaatgctgacaagttctgcacccaaatcatcgatcgtcacaaccagacggtcattttccatcttaaattttcccatatctattcgccttctctttcttatgcaatctattgatgtatatttttattatcaaacagcaacatatcccgcttgtatcagcttctgaccgcccatcggagttttgtggaatgtgcacggctgttgcatctgcattcttccgcagaaggacgaatcacatccttcgcggcttcactgtaaataccagctttcacattttccttgaaagatttctttaccagtctgtcttctcctgaatggaacgtcaaaacagctactctgccgcccggattcaacacatccggaagtttctgaagaaaagcttccaacacttcaaattcactgttcacatcaatacgcagcgcctgaaatgttctggcacaggatttcttcactgcctctttccgatctgcagccggtactctgaccaacgccttttcaattaattcacgcagttttgatgttgtatccaccggatgcccttttttcagttcctgcatcacaactgacgcgatctctgccgcataaggttcatcagagttctcaatcaacataccctcaaattcatcccttgtcacatgctttaaccgctcggatgcaggctctccctttgtctgatccagtctcagatccaacggtccgtcatatttataagaaaatcctctgtccgggttatcaatctgcatggaagaaacccccaggtctgccagtataaaatcgaatttgccatctttttcggctacctcatcaatattggcaaagttgatcttccgaaccgtcagtatgtccggtccgaatccctgatttctcaacctctcttctgtcttggccatctcaatggcatccacatcaagagccgtcagatgaccttcgccattcaggcacctcaacatagcggatgtatgcccgccatatcccaacgtagcatccagtcctctttgccccggctgaatctgcagaaaatcaaggatttcctgcaccatgatcgatatatgcattcctgccggtgtgccgcccttccgaatcactttctcaactgtttcaccgtatttctcaggattcagctccttgtatttctcgttgtaatgtctcggatgtgttcctttgtaccgtacccttctcttgtgtaccggttgattctctgtattactttccatttaatcttccttccatccttcgttcaaacgggataaaacacgcttcgcgcgtttcatcccgttatcacattctctactgttccattgccccggatgcctcaccggcttcaactgcaggtgctgcctcctccggtgcgctggttgccggcgcacttgtctctggcgggttcgttgccggtgcacttgtctcaggtgcacttgtctctggcgcacttgtctcaggtgggttcgtctctggcgcacttgtctctggcgcacttgtctctggcgcacttgtctcaggtgcttttgtttctgttgccttcgtctcagtttcctgctttttctctgtttccctctttgtctcagtctcttgcttcgtctctgcctctgtattcttgctgctagatgaactgcttccggatgtctgtccaggcacataagtgacaccgccgtacacgacaacataataacctgtgctgatattattatagagtgtttttgccttctcataaggcatattgatacatccgtgggaaccattgtactgataaattgttccgccgaaactgcttctccacgaagcatcatggaaaccaacaccgccgttaaacggcatccagaatgataccggtgatgcataatcggcacctcgaagaactgtattcttctccatgctgtatacctgataaacaccggtcggtgtcatatgggtctggctgacacttcctgatacaatattcgaggacatgatcagttcactattcttatataaatacaacttctgattcgtcagatccacttccacataattgcctccgaaattcttcttgataccggaagcactttccgtataaggcacttcacgctcgcctgaaacttcatctgtcagacactgtaaaacatcttcaaataaagcacttgtatcaagagtctctccgctcaccggtacattcaatgaaatcacacttcccgatgtagttgtgaaatccatattcatcttcttggaactgtatttctcagaaatgccattcacccattcctgtactttatcatgatcaatctgaagcgtaccgtcttcatcaatatacacccactggctgatctgttcgtgattgatcacttcttccttcttttcaccgttcttcttaaatggatacttcagttctacctgaagataggcattagcctgctgcaaaatcttattggcattctcagaatcctcactcaaaacaggcttcttatacaggcccttggcctcaacatccagtttcgatacattctcttcaatcgcatcttcaaccgctgctgtcacttcaccttcatccagcgttgttccctgctcaccgttacgcaatgaaaaagcattcttccctgcatcataaaccagctgtgcattctccggtgcgatcatcttcgttgtatccattgcactgcactgcgccaattcctgtttgacgcgctcttcattatatgtaaaaagattattcactgtcagtgccagatccttctgatcggtttctttcagcttatgctcattctgccgatccttcaatgcctgcagatctgacgcttcattgtaagccatctgaatgtcactgcctttgatggtcagctgttcattcttaaaatctacgacaagctcatagtccttcgcagattccttcagctgttcttccaactcgctgacagacattccttcaatattcatatcattcaatgttgttcccggataaaaaacattcttataattattacttccggccacaaaataccagccgccgaaaccagctgtcaaagcagccactgccaccacagttatgccaaatatcctgaacttcttattcttcatcatctattccccctgtagaatcattctattttaattttttactattcgcctattatatcacagattcagaaaaaaaacggattcttttttcttaaaataatatgacttttcacggatttgaaaaagggaccgttgtgcctgcaacgatccctcgacaaaatactgctttattcttgttattccgatttcaattgtcaaaatatcttatatttcggcatgacagcccatctgttattttctggcgatatacccctttgctgtcaggaattccgcacaaagaacagcaccgcctgctgcaccgcggactgtattgtgggataaaccaacaaacttgtaatcatacaccttatcttcacgaagacgaccaacagaaatacccataccatgctcatagtcaacatccagacttacctgaggacgattgtcttcttcaagatactgaataaactgcttcggcgcgcttggcagctccagtttctgaggctcacccgagaaattcaccagtttttcaatcaactgttcctttgtcggtttctttgcaaatttaacaaatacagccgctgtatgaccattcaatacaggaacacggatacactgagatgtaatgatcgggctctctgccttcacaatctcaccattctcaatatgtccccagagtcttaaaggctccatctcagacttttcttcttcaccgccaatgtaagggataatgttgccaaccatctctggccagtctttgaaagtcttgccggcaccggaaatagcctgataggttgtaacaacaacttctgtcggctcaaattccttccatgctgtcagaacaggggcataactctgaatggaacagttcggtttaacggcaataaaacctcttgttgttcccagacgtttcttctgatccttgataacttcaaaatgctccggattgatctccggaacgaccatcggtacatccggtgtccatctatgggcactgttgtttgaaacaacaggtgtctcacatttcgcataggcttcctcaatcttcttgatctcatccttggacatatcaactgcactgaatacgaaatctacatccttgcacatttcttcaacttccagtacgtttcgcacaacaagcttcttcacagtctccggcattggtgtatccatcttccatctgtcaccaacggcatcttcataggtcttgcctgcggaacgcggacttgcagccacagctgttacttcaaaccatggatgattctccagcaaactgataaaacgctgtccgaccatacctgttgcacctaaaattccaactcttaacttctcactcataacaattgactcctattcgtattcattctctctcaaaaatgtccgcattggaaacacatttgtctttcactagtgtatactacatcaacttctcacaaaatgcaagtattgtttttagaaaaaatataaaaattttatttttattttgatgtatttgtggtattataaatcatatattctaatcagacgattgtctacttgttttttagaaagggtgactatttcatgaagaagacaataaaggctattgcagccgctgcagcaattggtgcaggtatcggcgcagttgtttactttatcaagaataaactgtatcaggaagatctgtctgacgactttgatgatgattttgatgatgatttcgatgattttgatgatgacgaagaagacgcatcctctaaggattcccgtgaatatgtcaatctgcatccgacatccgagaaggaagaagatgctgaatcagaaccagctgaagatgcacctgaagacgagccagaggaagacgatcattccggagctgaagccgcagaagaagaataatcattttcccggcagctttcagactgacgaatatattaatcacactgctgcttcggcaccagtttaataaaggagatttcaacaatgagtacagaagaaaaagaattagaagtaacatccacagaagcacctaagaaacctgcaagaaaacctcgtaagccggttgatcctgctgtatgggaagaattaaaggctatgcaggaaagcggtgaagttctgacagttaagatcaatgctgctgtcaatgccggtgtcatctcttatgtaaagggtgttcgcggatttattcctgcttctttattatccatcgcttatgtcgaagatttaaacgaatgggttgataaatctatcgaagttaagattattactgtcgatccagaagagaaacgtcttgttctctcaggcaaagctgtagaacaggaaaaggcagctgctgaaagagctgctaagatggatgctgtcaatgttggtgacatctacgacggtaaagttgaaagaatcacttctttcggcgcttttgtaggctttgctgatgacttatccggtcttgttcacatctctcagatggccaacaagcatatcgaatccccgaacgaagttgtcaaagtcggtgacgaagttaaggttaaggttatcggcaagaaagatggcaagatcagcctcagcatgaaagctgctcttgatgcagatgcagaagtagttgataacagagaacctgctttcaactacaaagaagaaggtcaggcagcaacaagccttgcttccttacttgcaggcatcaagttagactaatctttattatcgttggaatgcaatgcccggatcatcagaattgttgattcgggcatttttatattatgaaagaagggctgcttttcaaaaagcagcccttctttcatcacatattcaattaacccagccacttcaatgacggccaatacatcacaaaggccttcgctatgatcttatccttcttcacataggtattgtgccagtacctggaatccttcgaaacagccctattatctcccaacatgaaataactgtcctccggcacctgataaggcccgaaatcacctgtcggctcctcactcagataaggctcatccagcaattcaccattaatatagaccttaccactgattatttctactgtttctcccggcagaccgataatacgcttcagataatcaacactctcatcatccgggtatttgaaaataacgatatcgcctctctccggttctttaaaatcgtaatacaatcgaagtcccatgatcctggatccggcagggatcgttgtttccatcgatccggtaggtacaaccgcattcgctataataaaaaagtccacaagcaaagcaataataatcgctgaaacaatcaccttgacccagctgaacacttcggcttttatggaggctttcttctcctcagacataaactttctcgtctcctcactgtataagtcttcattcatttaaagcattaaacgcaataaaatatgcattacattataacatatacattgagaaatgacaaacatttattatataaagaacacacccagcagtgcgatcaaaatcggtgccacaagagatacccaaaaaattggcatataagaatgcttatgatccaattttcccatcgtcagaatcagaacaacaaacgaattccatggtacagtatcaaagccacccgaagcagtaactacaattctgtggatccactcagggcttagtcccgctgcaatccatgcatcactaaacatttcgagcgtcatggcaatagcgcctgaggctgaaccgcaaattaaagccataatattggtaatgccaacaactgaaaatgctgttgcaactttagaagtcgaactaaaagtcaacaattgactcttaatcacatcaaaggcatccgtctgtgcaactacctgtgcaataccaacaaccaccgttaccatgattaacggcataacaccattcgaaaaaccttcatttaatgttgaaatcattttacccttctcgatatgacgatagaaaagaataatgcagagaatcacactgagtcctagtccatatattggtttcagattggcaaaattaataagcaaaatacctgccaatattggtacaactgacgcaaccatgcttggtgcattctcatggccgctctcattttctgattcatctacaggcggaagagaattgcgtttccattctaccttctgtgcccgttttaactcccatgcgatatacagaccgcataccgcaaaatatataatcgtaaatactgttcccattaaaggggccgccatcaggtttgttccaagaattttggttggaataatattatgactctgaagtccacccggcgtcatcaactccggtccgataatcggaacaatcgtaatagccggccacatataccatggtgtctttgtctgtttaaaaattggttttgccaaaggcagtaatacaaagcagatcacaaaagtagaaataccgccatattcaagaatcgcggcaactgccatataaccgacaatggcaaactttgtaccacatttatccacgaccgtttttcctattttccatgctgcaccactggcatcatataatttgccaagcatggcgccctcgcagaacaggataaaataagcggccgcataagatgtaaaactgctgacaaaattaaccgtcaatgcctcatataaattcagactgttcgtcagtgcaatgataataacactgataatactgctgtaaaggatactccagcctttataaacagccactgtcagaaaaacaagtgccgcaataataccaatcagacctatcgcaaaattcatttgctgctcctttcccctctcgccaggcacaggttatgtgcccggcaccatttatcatttgtatcaattatttcttcaaaccgagaatctgtcttgcttcatccggtgttgcaacttcatagccaaattcttcaataacacggcgtgctcttgcaatcagctgcatattgctttctgccagctgtcctttcttatagacaacattatcttccataccaactctgatattaccgccggctgcaatcgctgcatacatgatttccatagcacctttaccgacaccgaacgcactccatgtggaaccaggaactactctctccagtgtctgtttcataaatacaagatcatcgatggttgctgagataccgcccgcacagcccatacaaaactggaaatgaagaggtgctttcagataacctgtcttgagataataagccgcatcatgaatcataccaggatcaaagacttcaatttcaggtttaacccctacttcctgcatagctgtacccatatttctcaaaaaatttggattgttgttgaaaatacccatatgcatccagttcattgtaccgcagtcaaaagatgccatctcaggtttcagcgtcttgaaaggtgccattcttgcttcttctgaattcgcaataccgccagccgctgtcaggttgaaaatgatatcgcagtccggatgattttcacgtacaagatcaatgacctttttgaaagtctcaactttcatagaatcgttgccttcttcatcacgaacatgcacatgggctacagccgcaccgattttccagcactgataaatttcttctgcaatttcttccggctgcaatggaacatttggattattctctttctttggccatgcacctgtagttgctactgtaataatacgtttattctttaaatctgccattttaaaataccccttttcattttgattttcaatatttaatcgtaattcttgcttgcttttaactgaacgatcagacgtctgtagaaatccatctgtatctgtccgcgtttttcctccggatattcaaagaaccctttacctgtcttaatcccgagattgccttctgccacaaggtttctcatggcatcacaggctttgtccgaattatccagtgctggcagcatattatcctcgccggccagccatacatccagaccgcccatatccgccacttccagcatacctgttgtggcatttctgaaacatgggccatattttaatgcctgatctacatcctccgctgttgctgctccgatttctaccagatggaaagcctctctggcctgggcatgcagcagacggttagccaccatgcctgtaatatctttcaatacgcgcacaggcttcttctcacatctgacatagagttcatacacttcattaaatacatcctcatccatattgccgaactttgacagctctgcaattggtaaaagataagccggattgtaccagtggctgaccatacaccgcttctgtcgttcttccggcagatactgaatcatctcacttaatttcagactggatgtattcgttgcaaaaaccgtatgcggcggacagattttatccagcttaccaaaaagtttctgtttcagctccatcttctccgggcaggcttcaatggcataatctgcattctttgcggcctcttccagattgtcatagattgtaatattggcgatggcattttccatatcttttttagaaatataatcttcatctaccataaactgcagttcctcacgaatttttttcggtgctgataaacgaaccgcatcaaaaggctcataaagactcaccttacagccatgtcttgcaaatacatgggcaatgccatgacccatggtacctgcgccaagtacagtcacattcttaatcatcttttatcctcctttgtcttctatgccctaataataagcaacccccgtgccaactctgaaaaccgcataaaaccgttcttcttttcataaataatcaaaaaagtgttaaatatttcaacacattttcatcataaacgttgaaatatttaacacttgtaggcatttgtatttttacatgctataatttatatcgtataaacagcttagcgaaacaccggacatatttaaaaagacttcatacttgtgaaaggctgtattttttaagcattgttttacataatgatgaaaggattttacttatgaaagtatcaagactgcttttagatgccctggaaacttttccgaattttgttattattgataaaaatgccaatgttgtctatctgaacgaaagctatgcggtcctcttaggcattcagcgtgatgccgccatcggcaagcctgtccagtctgtcattcccggcacccgcctgcatcttgtcttgaaaagtcagaaaaaggaagtcggcgaattaatgacactttttgaccataccgttaatgattacatcaccgttgtctgtaatcgtatgccgattttccgtgacggtcaacttgtaggtgctgccgctgtcacaaccatgcagaatattacagaaaccatcagccgtctgcacagtgaaattcaggatattaaaaaggaaaatgcccagtacaaaaaggaactggacattttaatgaaaacacagcattcactggaccgtattatcggtacttcccatcagattactgaaatcaaaagtacaattgaagattttgcattttctaatctttctattttgattacaggtgaaaccggtgtcggcaaagaactatttgcccgagcgatccatgatctgagtccccgaaagctcaacaactatgtgaaaatcaactgtgccgctattccaaatgaacttctggaatccgaattattcggctatgaatccggtgctttttcaggtgctctaaaaggcggcaaaatcggtaaatttgaactggccaacaacggcacactgctgctggatgaaatcggcgagatgccaatgactcttcagagcaagctgcttcgtgtccttcaggaacaggagcttgaacatgtaggcggtgtcaaaccaatcaagatcaacgtgcgcatcatctgcagcaccaatcagaatcttcagaaactgattgcggagggcaagttccgccgtgacctttactatcgcatcaacactgttgaattaaatatcccgccccttagagaacgcatccaggatattcctgaactctgccagtattttctggaacgatacaacatgcaagagtacaaaaatgtcaaaggcatttccagagaagtactggagcttttttcacagtacagttggcccggcaatatccgcgaactggagcacgtcatggaacgactttttatcatcagtgacaacaaaactattacactgaaaaactgtgattttctaaaaaagcgcatgatgattccagaaagccatacactgaaaatcaacagcaccgaccgctgcgaaaccctggcccatgctgtcgatgatacagaaaaagagcggattctgtccgcccttgaaaaaaccggcggcaataaagccaaagccgccagaattcttgatattgaccgtacttctctctattacaaaatgaagaagctcggtatttataaatagccttttattttacaaacaatgttattctaaagtcctgattcaccggcgatcaggacttttttcccctgaaaagcaaagccgtaatgatgaatctgcgcctttttaaagccctgcgccaaaagttcagcgtcataatgtttatcctcaatctgctgcaatgcagcttgcacagtttcctcaagtgtctgctctttccgactgttatgaaccttgaattccatcacaattgcaggcaaatgttttcctgaacgttctcttggaatcatcatcacatcataacggccaaatccactttcccgatttgaacgtatcctgtaattctcccactgttctacaataagtcccagtataaacccatgataaaaacgttctggctcatctgtctcagaacaatcactccctgtatcaaaaaaactaaaggttgccatgataacttcattcagataatgattcatcgcctcgatatcatccgacaataaagctttcataaaaccattgtagctagactgggtaatgccaaaccaactcttgaacatgcttgaaaacatgcttgccgtttcgagatttgtaatgcttaaataataccatggttccatcgtcataccccgatattccacacgatctgctttcagatagccactggctaaaagcagactccagatagcattctcatcccgatccaactgttcaaatacaatctgctcatcaaaacatgcctcaatctgcccgccgtttaataatgtctccattccggtttttatctcagaagacgctgtttgaatcatccgattaataaggccgttggaactggttgcagcccaataagatctaatctgtccttcttttaaaaaattagtgattgaccagggattataaatatccttttttgaaccaaagataaagccgtcataccacgctttgacagaacttttctgttctccaagatcaaaaagttccagtgcctgaaatacttctttttcggtaaatccaaaacattctgcatacctttcagacgttgccgtgataaccaccagattattcaaatccgaaaaaatcgaagccttggatattcttgtaattcccgtcatcaaagctctttcaagataaggattggttttaaatgtagaattaaacaatcctcttacaaacgatgtaaatttatcccaataatcatggatataggcttcctgcatcggtgtatcatattcatccagcaggataatcgccttcctgccataatataaatagcaataatatgacaaatcctgcagtgcactctgtgcgatcacatcgtccatatcagctgtcacattcataaattgtctcctctgaacttccgtcagcgcttctgaccgtccaatctcatgaaactgctgatatacatttgcaataattttcttaatcttataaatggcatctctgtaattgtcctgcttgacatccgcaaaactcagaaaaatcaccggatatttgccttgaatagctctataatcttctttctcccagacagataacccttcaaacaagtccgctctttctgcgtactgatgagaaaagaaacagttgagcatactcatattcagcgtcttgccaaaacggcgcggtctggcaatcagcgtaatgtcatcacctgattcccaccattcactaatgaaatgcgtcttatctacaaaaaaataattgccctctctaagggaagcaaaatcctgcttgccgatacttataacctgattcatatatactccattatctgttattcaatgcactctgcctgttactctacatccatatcgccaaaatcaatgactaattcatcataaataccggccttcacagaatccttcaacgtatattcttccatgctctcttcctccgcagactctgccacaaaatggtacacaaatattctatccttatccgaatctacaatccaatattctctgacgcctgccgttctgtatttaaccagtttcgtataataatccattcgtctgctggccggtgaaacaatctctataatccagtccggcgcacctttacagcccttgtctgtcagtttatttttatcacagataaccgatatatccggctcaacataggtatttgcggattcatccagatacactgcaaaaggagccgcatacaccttaccctgcccacctttcgaacgaacataggcctttatctgactcgaaagctccatcgaaacatcctgatgctttctcgtggttggtgccatataataaatctgaccatcaattaattctgccctttcatcctccggcaaagcataaatatcatcaactgtatatgttttttcttttattaacggcatccaatcactcctttaactattctattcgcttataaactatctctagtataccagtttacactatttccaacaagggatattcttgtgcattgtcttgccatgatgtaaagcatttaataaaataatcattaccgcttttcaaaaagattatcccgacattgactatgaactaattcttacacattgttacaaactgtctggccgccgaattcagcggatgctgataatcatacaccaggcagatttctcttatcggtatttcttcctgcaattgaatcgtcacaatctcctctttcttcaacgattctcttgtcatcggctccggtacaaaagccagccccagttcagacttaaccatcagtagaatctgatctgttgtggctacttcgatatccggcgcaaattcctgtccatgtgtcataaaaaaacggttgtaaaacttataagtcatcgtttcccgaccaagtcccatcagtgaatattccttcaattcagacaaactgactgcacgactggtcagatgttcaaaggttctgccgcccacaagtatgtcctgaaaagaggccagtgaagtcaccttcagcggtcccgctgtttccacgggtgtcgataccacagcaaaatcaactttaccgcttctgaccgcctcaagagcctgcggtgtcgaataattatagatttttaaacggattcccgggtaactctgatgaaaactttttaattgatccaccaaaaaaatattcagcgccgtctcacttgtgccgatcacaatattaccgtacagcaggccatcattttccgaaagagcctcttccgctgcaaaaatctgagccatggcagcagatacataattataaagttcctctccctccgatgtcagctgaacacctctgtttgtccgaataaacaacgtcgcatgtacctgctgctccagacagttcatcgctctcgtaatattcggctgactatttcccaggactctggccgcctttgtaaaattgcgatacttggccacataataaaaaatccgataatactcaaaattgacattcatacttttactccagacatatcaaaacataatcgatatcatatcaattatagtttttacttatttctacattcatagtataatcgaacagaatatgaaaatcaaggaaggacgtgtaataaataatggaagaaaaaacgatttttcctcgggaagagcattcagatatattatttcaaaaaattttaaatgatccatgggcttgtgaaaaacttcaggcaacattctgcgattttctattttgtaatgatgaatttgatcatcccctttcacctgaagaattttccaaagccttatttgaatcctataagaatagagatttgtccgcatttttgatgggcatttgccagaatactatttttgaccttcttcggaattcttttctgattccttaccgtttcaatgcagacggcaaacagaatccgattatcatgaccgatgaaaaaggtctcttacttccggagtatgataatcctttttataagaaagaatacagtacttttcaaaaaatttatcatgatcttgaatcagatagaaacatttttctggctcaagcctatcgctacagccatgattacggtccaaaccatatgaatatcgagcagaagattcttgagatcacaacaggcattcttctgatccgtgaacttccggacacagtaaaactcaaagaaaccgaggcagaggcctatgctgctgtctgggatatcatgatcgcactggaaaaagagctgccgatggcctatgtcttttatggacaggacacactggtagaacataataaacgatatgacgaaatcggcatatttttaccgaactctcattttctgaaacatctggagaaacatattgaaaaagccgaggcgattatctatgcgcaaaaataatactgcatcagcacctgccgcttcttatgttgatatcatggaaaaaaaccatatggaaattccatggcatgattatgcagatgctgacagccatgttatcatcagtcaggctggattgattgagaaatcctctgtcatcggccgtgtaggtctgatcatgctttcctgcggcaccggtgcatggcgcgtccgtacttccatgaaccgtttgtccagagaacttggtgtgacctgtactgttgatgttggattaatgtccatttcattcaactgctttgacggcaaagactgcgtttcacagtctctcagcatcgccaataccggtgtcaatacatctaagctgtatcgaatggaacaattcgtagattcttttccgacaatggaagccaaacttaccggtgaagaaatccataaaagactggatgaaattgaagaaatccacggtctgtattcacctgtaaaacttggttttgcagcagcactggcctgcagcgcctttacatttttacttggcggtggccctgtggaaatgatactggcctttattgcagccggtatcggtaattttatccgtacaaagctgattaaacaccactatacattgtttttaaatatcgcagcctccatatcggctgcctgcctggtttatgcactgcttttgaagttgtctgaggtctgcttcggcatctcctcattccatgaagcaggctatatctgttccatgttatttatcattccgggctttccctttattacaagcggcattgaccttgccaaactggatcttcgttccggtctggaacgtctgacctacgcaatcattattgtgcttgttgccacaatgtttgcatggatcatggctttactactgaaattgaaacccgttgattttgctgccatgaacattgatcccctcttacatatgtttcttcggatcattaccagcttctgcggcgttttcggtttctcaatcatgttcaacagtgccattcctatcgcagccaccgctgcgctgattggcgctgctgccaacacattacgacttgaactcattgatttcacccagatgccatctgcggaggccgctttcatcggtgcactgacagcaggtttacttgcatccattattaaacgaaatcatggttatccaagaatatctatcactgttccttccattgtgatcatggttccagggctttacctctatcgtgccatctataatcttggcattatgtccctgaacgaatccgtttcgtggtttgcagcagcgattatgatcatagccgctctcccccttggcctgatcttcgcaagaatcctgactgaccgcacattccgttattgtacttaacccggcaagtactaagacaataactgataatttttactggaggaatcatcaatgagtttcaagcaccacaaacaaatgtccgaatctttcctgactgctgcctttttgtcagtgtcaggaggattacaggacgcttatacttatatttttcgtggaaaagtctttgccaatgcccagacaggcaatattgtcctgctgagccaaagcattatcgataaagactttgtccgggcgatccattaccttgtgcctcttttgttttttgccctgggcatcgccatcgctgaatgtatccacatcaaatttcagcgtatccaacatatccattggcgccaactggttctcgtacttgagattcttcttttgctggttgttggatttctgccgacacgactgaatctgctggccaatgccatggtttcattctcatgtgccatgcaggttcagagttttcgtaaagtcaacggatacgcctttgccagtactatgtgcatcggcaacatccgaagcggcacagatgccttatgtgcttttatccgtacccgtgataaaaacactctgcgcaaatccctgtgctactggggaatcattttactctttgccatcggtgcaggtatcggcggttacggcattacaattttcggcatgcgaaccatatggatttcctgtatgcttcttctgatcggatttcttatgatgttcatcaaagaagaacagacagaacatatggaaccgatgacactttaaataagcccacttcttttcattttttatctatcctttatatctcataggcaatattacctatgaaaaaaagtgtcctgaatctaccttcagggcactttttcacattcgcatcttatacaaatcaaacctgtattctatttaactttcttatttcacttctacaagttcgattttgaaattcaattccttgcctgccatctcatgattggcatcaaaagtaatcatcttctcatccttatccgtaacctttacaaggaaaggctgaccgtactgattggtcaggtaaacctgctgacccactgtcagttcctcagatcccggaagctgtgcgatctcgacttcaataatcgcattcggatccggcatgccataagcctcttccggcatcagatgaatttctttgatctcaccgacttccatatcagccacggctgcatcaaaacctttgatcatctgtcctgcgccgcagacgaattccagcggctcaccgcggtcataggatgaatcaaactgtgtgccgtcgttaaaagtacctctgtaatgggtgcggcatgtcttgccgacattacgtcctgtcattgtattttccatgattaaaaatcctccgtttatccgttttttattcgacatgatgtcttcttttaagagtacactaccaatcgtcttttcacaagtaaaacttttataaattttcagctttcacttttcatccccggaaacatatgataaaagtagaattccccggaggatttttccgtatgcatttaaaaaagtttttctcagcggctgcactgcttggctgtcttaccatgatctttaccggctgttcccaaaaaagttccggcctgacaccggtcaccctcagcgaagttgcccattccatcttctatgctcccatgtatgtggctatcgaaaatggctactttgccgatgaaggtctggatattactctggtgaacggttccggtgcagataatgtaatgacatctctcatatccggcgacgcagatataggctttatggggcccgaagccactgtctatgtctataaccaaggggcacagaactatgctgtcaattttgcccagctgacacagcgcgccggcaacttccttgttgcaagagaggaagaaccggatttcacatggcaggatttaaaaagcaaaaccgttctgggcggtcgtgaaggcggcatgcctgaaatgattttcgagtatgtattaaccctcaacaacattgacccgaaaaatgacctgactattatccagaatgtggatttcggactgacggccgaagcctttgccagcggcaccgccgactataccgtagaatttgaaccatttgctacctctctggaaatgaacggcaacgggcatgttatcgcatctctcggcgaagactccggctatgtcccatatacctgtttctcggcccttgagagctatattcaggcgcatccggatatcattcaggcatttaccaatgccatccaaaaaggcctggattacgtgggcagccacacacctgctgaaattgctgatgtcatccagccgcaatttgaagagactgataccgataagctcattgccattatcgaccgttacgctgcacaggatacgtggaaggaagactgtattttcacagaggaagctttcaacttgctgcagaatatccttgaccaggccggagaactgactgagcgggtggattatggcactcttattacaacagaatttgccgaaaaagctgttcaagaatgaaataacactaaatctccgagataaatatctcttttaaacagcaataacctcaaaatccatcctactcaaaaactgagtttggattttgaggttattttactgccaaaattactgacccgctacttttattttttgccacacaaaatcatgcatcagcccattcggacaccagtccatagtcagttcttccagtaatgccatatctcggtttgcataggctttctctatttcataacagtaaaaagaaatcagtctgtccacaaacgcttcttctgattttcctgcactgactgcacgtatcctttctacaaactcatcacagctattttgactgtccttctcctggcctttacaattttctgtcattgctgcaagtatctctcctatctcatcaaacgccctggatactctgctttgtcgtctgacatccgatatttcaagttttttcttctcttcctgcagaaattgtctccaaatcagcttaaatccttcatcgatttcaccttttcccttaatatatccattaaaaggtgctgttattgaataccatcttccgttcagcttctcaacatatctttttctttcttttaccgttgtattttttacaagatatttttcatatatttgatttgtcgggcttataaactgcgtttttatcacagcagtcaaacgacgtaatatcagatttttcgaccaccccatatcaacaatatccaaatgtcctgtactatttatccactgaataacaaatgatacactcgcataattcatatcccactgactgttatttattttctcaaaattcactttaaagtacctcgtgttatattgctaataacttttttgtttttgcagttgtaaactggataaccggaccagaaaacagaatagtggctattgcacatataccaaactttccgcctaatacaacaccgacaatcaccatcaaaacatccagtatcatccgcacacctttcacctgccagtgattcttctcggcaagcgaaaaagttagagcctcatacgagccccgccccatagacgctgatgcataaaatccggtaccgacagcaaacaacataactcctaatatcataatgactgcatttagccataaatgtgaactatatacatgggcatctgcaaataaatctacacaaaaactgtacaccaactgatacaagattgtgccgatattcagctgtgaacgatcataaaaaaatacaaaaactatcattatcaaagccactatcagagaagccataccaatacttatatgaaatgtttttgacatgccttgccatacgattgcgagggtcgcccctccaaatcccgcatacaaggccaacgtaatgccatatgctgcaagcatcgatcccagcacaataatcattatcttttttatccattccattcttcccattgctataacctctttctgtacggatactaaaacaaacgaaaacgatctgctcttagccaatcgcactcattatctgcataaaaaaaaactatagacttaactgttatgttcagaaacagtagaaatctatagccttcattattcgtttgccgagacaagctccgtattcatttgaatatatcatacataccttcagagcatttgtcaatacttttttgtattgacaaatgctctgtttattatcttcaagcactgcgatctattcggcagcttcatcaccgaaaggtgttctgtcatccagtgcataggccttcaactctcttgcatccgccagatactgatctgcctggctcttataatcagcttcagaagacgcagacacaagcaccgtctcagtgatcatctcaccatcgtatttatactgcacaagctcatacttatcattctggttgttgaatgccaagaagccatacttcgttgacaaataggctgtatcaatggccattgcaccgatggttgtcactgctccctgattgcatgaataaacactcatggcctctttgccgacaatcagttccggtgaaccgttgcctgtcacatccatcagataataaacagcctcctgatcagaagttccatccagaagaactttgtaattcttctgaaccgtttcatccatcgcagtcgtctccggctcactgttgacggcctccgcgacttcggatacaatatctaccggcttttcagatgccgcttcctgattgctgcctctgccacatgctgcaagcagcaccgtcaggagcaaaatcatacacactgtacatgttttgtccaacttcattctcttcataatgacccattgattaatacagaagaataacggcaaaggcttccagattctctgtctcagatgcatttctgatgccatgtgtctgtccgcccagacaaacacaggaatccccttcatgaagtgtcaccattgtgccgttgtcattgtattctgcatttccctttgcaatacaaataatttcttcttcaccttcatgtgtatgctcgccgatagaacatcccggcttaagcaccagcttcgcgatcatcttagcatttccgttaaactcctcaggttcaagataacggataatctccacagttccgtctccgtctcgcatatgctcattgtataacttcaccatatcttctgctcgtttaatcattgctgtctacctcctgtacatttcccgatccatactaaaaaatcggatattttcgtctcttagcataccatctgcaggcagtgaatgcaagcctttcatcaacatggttttcattactacatattgcaatttttgattgaccttttgctattttatagactatactataaggagataaattttcaacgaaaggactgaacccgatcatggaacaaggcaacgatatcccttccgtcatcgaagaagttttcaaacgctattccgatggcagttatatcaaggcgtccatgctgccggatcttgatttatatgtagaccagattacaacattcctgacccggcatcttgccaaaaccatccgttttgaagatgacaagatcatgaccaagaccatgatcaacaactacacgaagaatcatctgctgccgccgccggacaagaagaagtattccagagaccatattcttctgatgatctttatttactattttaagaattttctgcccatcagcgatatcaagaccattctggggcctctgacggacaagtattttcataaggatgcggatctgaatctggaggctatctacacaaccctcttttccaaggaggatactttcgttcaggaagtactggagaatgttatgaagcagttccacatgtcagcagacctgtttcccgatgctccgaaggctgatcaggcatccctccgggaatttacatttatctgtatgctgagtctggacatttatctcaagaaacagctcattgaagccattttggacaaaaaataaaggaatgcctgtgcattcctttattttataacaatttattcttcattcaggcgatccaggaccatatcataaccatcgttaccataattcagtgaacgattgacacggctgatcgttgcagtagaagcacctgtcttctctgcgatctcaaggtatgtcttcttctcgcgaagcattctggccacctcgaatcgctgtgataatgacagcagctcattaatggtacagatatcttcgaagaattcatagcactcttccacgctcttcagacaaagcatacctttgaataactgctcaacttccggcgttttaatttttttattcatgtcgtcacaaatccccttcattataaaataataatatgccattcgaacgtatgccgtccagtactgacttcctacttagcaagcaggcactgtccgacacacacaaacacattttatcattttagaggattaaagtccatagttatttataaaaatattattaaattttaaagatttccgtctgattccatttccaatcttctgtccgcggtacaaggatttttgtccgcatgccaacgattcaggcgatactgcgacggcgtacagccctccacctttttgaagacataacagaaatattccattttctcaaatccgcaatatcctgcaatctcctgaaccttcatctctgttgttgtcaggaacagccgtgcataatgcatgcgcacttcattgacaaacgtcataggggccgtaccaaaatgttgtttaaatgctctggaaaaatagctgatgcttgtcccataaagctgtgacaaactgttcagatccaatggctctgcgtaatgttcctgaatatattcataaattgtgttcagatccagactccggtaatccgtccctcttatatcatgtatcgtcaaaaacaaagactgcagcataacggatgctctgaaatactccccggcttcccaagtctgaatcatgctgtccagttccgccgccaggacgtttccgctgacattaaatcgttccccatcctgaatatgaagatattggagcattcccggaacaccctcgccatcaaactgtatgatcatgatccagcattcatcccctttcaatgccttgccgatggccatcttgcctttttcaataaaaatggcatcgcccttcctgagaatcatctgctgaccgctttcttcaatgtggattttaccactgcgcactatgacaatagtataacaatcaaaaacaagccttgtctgctgttcatggttctcagttttacgcataatgttatcaatatatacacttaatatcctataattgtcagtcttgtctgtcaatttcgcatttttcatctctttttacacctatactagttcaaaatttctataatataatatatttttagagtttcaatttgtttagaaaagttttataataataccagattgtttgtaaagtaacaaagagcacaattcaaattaaagggaggagttttttatgctcaagaaaatttctaatggttgtgtacatatcgtacagagatacttgcctgatccatttatcttctgtatcatattaacaatcgtcgtattcatcgcagcaattcctgctgcaggcgctacaccacttcaggttgtaggcttctggggcacgagcatctggagtctgttagcattctcaatgcagatggctctcgtactcgtacttggtacagctatggctactgcacctcctgtcaagagactccttgacaagattgcaggcgttgctaagacacctttctcagctatcgttcttgtaactgtagttggtactgttgcatcatggttaaactggggcttcggtctggttgttggtgctcttcttgcaaaatctattgccaagaaggttaaaggcgttgactaccgtctgttgatcgcttctgcatactcaggcttcgttgtatggcatgctggtctgtcaggttctattcctctgacaatcacagaagttacagaagctgttacagctgctacaggtggtgctctgacagaatccatcggtatggacagaacagttctttctccatggaacttaattgcctgcctgattatcctgattcttatgcctttactgaatgccaagatgcatccggcagcaaatgaagttgttacagttgatcctaagttacttgttgaagaagaagtcacagttagaaaagcttctactccagctgaaaaacttgaagattgcaaaccattatcatggctcgttgttatcatcggtgttgtttaccttgttcagtatttcgcagcagcaggcaatcctctgaatgcactgaacctgaacatcgttaacctgatcttccttgtactcggtgttttactgaatggtacacctctgaactacgttaaggctgttaatgacgctgttaagggcgccggcggtatcgttcttcagttcccattctacgctggtatcatgggtatcatgacaggtacagtcacagaaggcggtccttcacttgccggtgttatcagtaacttcttcgttgctatttccaatgacgtcacattccctctgttcacattcctgagcgccggtatcgttaacttcttcgtaccatcaggcggcggccagtgggcagtacaggctcctatcgtattacctgcaactattaaaatgggtcttgaccctgcagtttcctgtatggctattgcctggggcgatgcttggacaaaccttcttcagccattctgggctctgccagctcttggtatcgcaggtcttggcgcaagagatatcatgggattctgtattgttgaccttatcttatcaggtatcatcgtttgtataacattcgttgttgtcggtttgatctaatctgaacagaatttcatcaacaattaaaaattgattttttaacagtgcagcttttagttgcactgtttttttattcagagccagatatcattgtatatcacttatgtccgactctgaacaactactctgccttcatacgcttatgaatttcttctctgatccgcttctccacttccaatgcaatctccgttgtcttcataccggcatattcctcataatacatcggtttcatataatggatctgcacagttacaggctctgtggtacttctgtcaaagggtgcataactgtcaagcaatgccaccggaacaatcggtgctttcgtccttgtggccgccttaaaggcgcccgccttaaaaggaagggtttcattgccattccgactcctcgttccctccgcaaaaatcaaaaagttctctcctgctttcacccggttggaagcttccagaatcaccttcatggactgtttcatatcacttctatccataggaatatagtgaagtgcctctctgatctgctttaacagaataatatccttcacttcctgtttaaacaccagagaaaaaggccgcttcatcgtttcaagaaaagccagcacatcaaacattccctgatgattcggatagagaatataaccgtcttcttccggcagattctcctctccgctgctgacaatggtcactcttcctgctttgttggctttgatggcaatttcccggatatagttatatttttcctctatgctgtaccgctgttcctctgtatccttcgcaaaagaacaaatacgccagaaccagaccggcacatgtccaagaagcttcaacaccatcaacaatattcttttcataaataatacctgttctttcttttgaactccaaacaagtgaagcacacctaacgtgtatttcacttattatctgataatcagcattgatcaaatgactgagacaaagctgcatcaatggcactttctgtcttttgcaaatccgcttctgacaaagcatcattgacaaaaaaagcttcatactgagacggtgcaatatacatgccatgcgctttcatcactctaaaatactgtgtaaactgtgccagatttgatgtccggacatcatcaaatctcttcaccggtttatctgtaaagaaaatgctcatcagtgagccgactctgttgacctgagcctttacatgatatttttccacagcagacttaaaagcatgctcaattcctgcggatttttcttccaggcgctcatacacagccctatcttccatcaataatttcaacatcgctgttcccgctgccactgccaccggattgccagaaagggtgccggcctgataaaccggccctatcggtgatacacaatccataatctctctgcggccgccgtaaacagccatcggcataccgccgccgacaatcttaccgaaggtagtcatatccggtgtgacaccgtaataggactgggcaccgccaagagccagacgaaaaccggtaataacttcatcaaaaatcagtacggcgccgtattgctttgtgatatcacgcagcccctgaagaaagccatcttccggcggtacaacacccatattggctgccactggctccacgatcaatgctgcgatcttgtccccgtactgttcaaacagttttctgacactgtccagatcattatatctggcgatcagcgttgtatctgtgaaagccttaggcacaccggcgctgtccggtacattctctgtcagaagccctgaaccggctttcactagcaagccatccgaatggccatgataacagccttcaaatttcacaatataatccctgcctgtataacctcttgcagcacggatggcactcatcaccgcctctgtacccgaattgaccatacgcatcatttccatggaagggactgcggttcggatcagctctgccagctctacttccccattagtcggtgccccaaaactggtgcctttgatggctgcagctgtcaccgccttcaccacctcatccttggcatgaccaagaatcatcggtccccatgagccgacataatccacatactgatgaccttccacatcatagatataagccccttttgccctgaatataaaaggcggcgtcatcccaactgctctataggctctcacaggactgttgacacctcccggcatcagttcacaggctttttcaaatattttctgactcctcattatctctgtccctcttcttcccgcagccactctgcaatctgcggtgcataatacgtaataatcatctttgccccggcacgtttcatagcgatcatgctctccatcaccacgcgcttttcatcaatccagccattcatggctgctgctttcatcatggcatattcaccgctgacactgtaggtacataacggcagatcaaaagcttcactgacggttcggacaatatccaggtaagccagtgccggtttcaccataataatatcagcaccttcctccatgtccagttcagtctccagaagggcctccctgcggtttctgaaatccatctggtaactttttctgtcaccaaaggccggtgcagaatctgctgcctctctgaatgggccgtaaaaagcagacgcatacttgacactgtaggccatgatcaatgtatgtgcataaccggccgcatccagtgtatgacgcatatgaccgattctgccatccatcatatccgaaggtgccacaatatctgcacctgctgcggcacagctgacagccgcctttgacaaaagttccagggtctcgtcattcaatacttccccgtctttaatgacgccgcagtgaccatggtcggtgtattcgcaaaggcagatatccgcaatacagatcatctccggataaagtttctttgtcattctcaaggcacgctgtacaatcccatccgggtcgtaagcaccgcttccgcaggcatccttatgatccggcaccccgaaaaagataacggcacgcacacctttctcccacacttctttcaaatgaatagccagtctgtccagggaataatggtaaattcccggcatagattcaatcggtgactgtacattctcgccctctgtcacaaaaacaggatagatcagatcatcacatctgacatctacctcatgcaccagattacgaatctgtgcggttcttcttaaacgtcttggtcttctggttaaattcatctttccttcacctcattttatgtcattgttcagtgccgatgcagctccgaacattttgctgaattctcacattcaagactcgttcctacacagtatatcacaaagtgccgctgtcagtccctccaaatcatactgtcccgcaattttatctatagaaatatctgctttttcagccgcttctgctgtcaccggcccgatgcagacattctttgccgcaaaacgctgtccttctgtcatctgtgcaaaagccctgacggctgaagcactgcagaatgtcactgcatccatatcctccagcactttctttaaaagtgatgcttttttccacattttttctgtatgatacattggtgtatccaccacaaaaaatcctttttcccacaggcgttttatcagtacatctgaggcctcttcggctctgaacagacaaatttcttcatcatactgaacattatcacacaaggcttttgccagtgattcactgcaggactgttccggcaccagatccgcataacagccccaattctccagttctttgcgggttccggcacccatgaccgcaatcctgctgtctccaagacttctgatatccacctgctcctttttcatctgctcaaaaaagaatcgtacaccgtttctgctggtaaatacaagccagcgttttcccggacgaaccaacacttctttgagtccatacattttctcggctctcacagaaatcaggctcatcaccaccggttcaccgccaagcttcctgattttctcagccaatggtttagcaataatttccgttgccgtcacaagaattttcttcccggaaagggaccccgcctgctgccagtcgatttctttcttcaggctgaccacatcccccacaaccaggatcgccggaggctgaatgtccgctttttctgatatcgcagcaattctgccgagttcccccgttacacagcgctgtctggctgttgttcccgatgcaatcaccgccgccggggtatgggcatctttgccattggctatcaaccgctcactaatctggtgcagttttgaaagccccataagaaaaacaagagtgccttcctctctggccaaaatctcataatccagcgaactattttcttttgtcggatcctcatgaccggtgatcacatgaaaagacgatgcttttccccggtgggtgatggggatgcccgcataagccggtgcactgtaggccgatgacaccccaggtatcacttcatattcaattcccgccgctgccaacgccagtgcttcttcaccgccccggccgaatataaaaggatccccgccctttagtctggcaacagtctgaccttccatggctttttcaatcagcagttcttcgatttctgcctgtttcatccggtgatgccctgcaaacttgcctgcatcgatccactcagctgcatccttcgtctcatttaaaagagatgacgacgccagatggtcatagacaaccacatcggcttctttcagtgcttctatacctttcatagtgatcagtcctgtatcccccggtccggctccgatcagatagaccttgccgctctgaagcttttgagctgcccgacatcccagatcaaccgccatttgccggtctttcatcctgtcgccgtatcgtgtccctgatacagatatttccttcatatgtgctccgtctgctgcataccgtgccctcaccgtcatcttctcttcatccacagccgtatctacagctgctgcctcattgcagccgccgccaatggctttcaggaaggctcgctctgccagaaacatctgccatgtctgttcatcatgaatggcctgcatgcattcctcacagtcatgctgccttgtttcaacagcaataataccttgccccgctgccggaaagaattgttccttaggaagaatttcataaaagaatgtctgtccttccgcctcaaaacaacctgtctcatcacaggcatccgacaggtatcccagccgttttaaaccggctgcagccagaataatcccatcaaacagctcctctgacagttttttcagccgtgttggcacattgcctctgatatctctgatatcaacactgggacatatctgctgaatctgaagagcacgtcttaaactgcctgttcctacaactgtcttttctttgcattcttctatgatagaaaattcccgccgaagactcacccatacatcccggctgtcacctcttttaagcacagctcccactgtcagtccttccggcaattcgacaggaagatccttggcactatgaacggccagatcgatccggccatccatcatagccccttcaagctcctttgtaaaagctcctttgctgccgaaagctgacagggatttatccagatgcagatcaccctttgtctcaaatccggcaatctctatctctatggatggaaaaaccttcttaatggcctccgccgccatttccgtctgcaccatggccagacggctcttcctcgttccgattttcatattgaccctttccctcctctctgattttctcttcttttgcaatccactgtctcagatatttttttctgtttgactgaccgagcccggacattttcaactctctgcgcttctggcgaagctctatttccagttcaccataccattccggtatcaccgcttcgattttctcccgcagatgttttgtcagagccggtaccccgccggatgtactgataccaacaactacattgccccgtctgaccaccgatggaaacacacagtccgagacctcccccggattggcacaatccaccagtatatgccgcatctggcaataatccgctgccatcttattcaatgccttatcatcagaggcacagattaccagaaatgcttcggccaaatagtccagattgtgttctgtcagattttcatttgtccagactatatatttcttatctgccagaagttttaactcatccgtgatctttgatgaaatcatccgtatatctgcaccatattctatcaaaatacggattttccgaagggctaccgaaccgccgccgatgaccatgacttttcggccatccattttgataaacaacggaaaatcagccattttcccgcgcctcctcagattgtctcaacacttcaaaaaacatctcaagctgctccgtatctgccgcctccctggctcgataaaagaacttgttcagccctttctccggattcgctgccatatctgccagaagatgctccctgaaggtatccatcagcggtctgttctgttgaaacaaagcccaacgcctgaaatcatcaatatcctcctccaacatctcccgggccctgtcagccgcttcaaaacgcagatgctgattcttctcagacagacttgtcagctcatccagatgacaaaggctgttctcctcgtcttcaatgcccgcctcaatatccataggaactgccatgtcaatgaggattcttctgtgcttttggataacgccagactgccatccctcttttgtcaatgtgtaatgcggactggctgtggcactgataatcacatccatctcgttggccagtcgataacggtctgcataggcaatctgcacatattcttctgtctgctgatgtctcgttccatggccatccgacagagtatccgttcccagaaccgctttttctcccgatttcagctgtctggaagcagcatatagctgtacatgatgatccgcagcaatatttttcatcataatctgtccgattttaccagtggcaccaataaccagtatctttctattctccaggcttccaaaatacatttctgccgctttcaccgccaatgtagccgttgaaacagaaatgcctgaaagcttcgtctctgtcttgactttcttggccgctgtcactgccatccgaaaaagactgttgcaccatgttccgctgaaaccatcttccatagctgtcctgtgggcttctttcacctgaccgaggatctgatcctcacccaaaaccattgaatccagccccgccgccacataaaacaaatggcgcaccgcctgtgttccctgataaaaccgcaaatgctccgacacctcgccttcatcaccgattccggccatatcaagcatgatccgctgcattgcagtcatcacgctgcgcacagaaatattttcttcgctgacggtatacaactctgtccggttgcaggttgagagcagtacacattcccgaatttccttctgcgtacagatacgcgtcatcagttcttttttattttcatctgtaaacgcaaacagagcccgtatctgtacaggcgctgttttgtggctaatgcctattaattgtatattcattaatttctctctctgtaacaaagctgcccggcatgccgcaaataaaaataattcgctgcctgttataccagtatctgcacttcgtacagagaatgcctccagttataaaaatctttgtgctttaaaacagccaggatgatccttggacgcatgtccttttccacaaaataccgtgaaagggcgcgaatccacttatcctccctgaaaatggccgtagtcatacagatataattgcccttcggcaggatagactggttcttctcagcagaaacacaatctccgcctgagataaagctgccttcaatggccagcttttttccctccataaatgcagtttcttccaataagtaaccgcgcattttctgaaaatctgccatttcctcagccatcagcacacctgtctgccgatagaaatcctctacctcacatggcttcgccgtttctgtcatccaaactcttcgagaatccatctgcttctgatggatcctgtagctctcgtgccccgcctccggtgcagggttctggctcgtcaaccactccatcatagacattcgttctttcagacgcttcatttgcttttgcgtctgttccattcgctccgacatcagcaaccgtcgttcttcctccgaagcagcctccatcacaaccgtgatctccgccagggaaaatcccgccttcttgagatatccgacggttttgagtctctggatatcatcaaaatcataatagcggtaccccgtctgtctatcgatcctgacaggacagacaaccttcatatcggcataatagcgcagtgccgatactgaaagcccagtcatctcatgaacgtcaccaattgaataaagccgggtcatcacattaacctctgtatcttaaaacaaccacgtactgcgtttttttgccggaaagtgcccactctttctcttctttgagatatcccgactttgctgccagggataaaagccattctttctccgttgtgacaacgataacatatccccccggtgtcatccatgtgttcagctttctgacaaagttcttatataatgtaaagagaacatccggcgtcatcttgtcacttcccgccggcagttctgtcaatacctcaccaaaagtataactatgagaaaactccgcaaaatccttgttaataaagtaagacggtacattcgccagacttgcattttctctggctccgtcaatcgcctctccgaaaatatccacaccatagagatgtgcagccttcctcttacgataccgctcgatcaaaagcgtcgccgtaccgcagaatggatccaacacatccgcatcatccgccagatattcagaggcaattgaaacaacttccgctgctttcaccgggtgcatcgatgtggcaatagcattgcggcgatagctgaaccgactgtctgctatcgtatgtaaaatcaaataaacactgtactgtccctgcttattctctgtgatccgcagctcacattcataattggacgcggaattctgcagatgatgtccggacaagcgttccagttctgcccccagacgcttcacatactgactcttttcattcaaaaccagcttcgtccgcagatcaattctgaaataaaagggtccgtcaccttcatggcgcttcttcagatagtccgtcagtccggcatcatgaattgccgccgcaacagcctgatagtctgttgccttcaacggattggcacagaagcggaacataaagcccttcactgtacggataccgaaaagttctcccggacgttctgccagaatacgcacaccgcctctcattgccttggccgcatctctcacatttctcggcatcacatcaatggtcagctgctccatcccgggactggtcagcaaaatcatctctgaaggcaccgaatagcctgtaaatgtatgcttcaccggcttctccacaatcaacagcatatcccttaaaagcttcaattcctcattcagatgcttctgattctccggcgtcatctccatctgcatcagttcttccatccgctccctgaaagcgtttaaatacgtcctgtaatccaactgactcatggctgtcagataagcactctttacaaaaagcttctcctcgcattcataagcataaaacagggcatccaatgcatcctgacatcccatctcgccaagaatcaatgccgcattcttcctgactttggcatcttcatgcttcaaaagcttcagcatcagagacaggcatctctggcgatcacgctgccaggctgcactgccgggttctgtttttaaaagtttgcgcagctcgatcagattcttacgcacatcctcatcacgttctaatttatcaagataatttctaaacatttaatcctctctttttcatcttaaaatatcgcttaaattcctcttatcatcatatatggagtttcaaaaaaagtcaatacagaatggatgcacccctgcgctgcacaaacgttttcgcccatctcagcgaatctgcctgtgcatcattacaaaaagggctatccaaccggatagccctctctgataatcgctctaaacaactgcttattctaacatttaaaataaaaaatacaaacttcgtaatcaatataatatatcttagaaaaggcacactgcatgaaggattataacttaacgacattcactgcctgtggtcccttctggccttcaatgacttcgaattctacttcctgaccttcttccagtgacttaaagccattggactggatgcctgaataatgtacgaatacatcattgccctgctcatcggaaataaaaccgaatcccttctgattgttgaaccactttactgtacctttgttcattccaaagtcctccaaaaattaaaaatgggtcttactgcaggttattcttgcagcatgttcagcataccatacttaacctcaaaagtcaaaggaattcctatattcttgaataccaaaaggcttaaaaatatcgcagaaatgcccttttttcgccattttcttcaatggtccgacacatttccaaaacagcattccggtcggtctactcacaatatgcaaccaccgtatagacactgttttcatacttgacttccttgactgtggcatgcaggcttgtcagtctccgaagtgccggaatattgtcgctcatggccagtgccggttcaattgtataataatacatggtgcctgccagagtgttcagcttggattcgctcatctccacttcatcaccggccttcagaagatccggtctttccattcgaaatgaaacttcctgtttcaacttattcaccagccttaaaagatgcgtagcgcttcaaaacgccgagaatcagatcaacagacagatccatgccctctgctgtgatatgctcataaggaccatgataagcataaccacctgtaccgatatccggacaaggcagtcccctgaaactgagctgtgcaccatctgtaccgcctctgacaggcacgatcagcggtttcaggccaatttcctcagcagctgctttcgcattctcgatcagatggaaatgcggcagaatcttctcggacatattgcggtactgctctgtaatggtcagttccacagtgccttcaccataacggccatttaagacagtctggatatgctgcagttcttttttgcgcagttcaaaggccgccagatcatgatctctgacaatatactgcatctcggccttttctacattaccgctcatatctgtcagatgatagaagccttcatagtcttccgtatgttccggtctgtccgctgccggcagcatctgatgcagctcccatgccacgttcagtgcattgatcatcgtatctttggcacttcccggatggacattgaaaccgttgatcacaaatttggctgcacaggcattgaaattctcataggtgatttcgccttcttcgccgccgtcgatggtataggcataatccgcaccaaaagcatccagatcaagggctgaggcaccgcttcccacttcttcatccggtgtaaaagcaatacagatcttgccatgcggaatgttttctttgatcagatgttcaacaactgtcatgatctccgcaataccggctttgtcatccgcaccaagcactgttgtaccatctgttacaatcagtgttctgccctttaaagacggcagatgtggaaattgtgccgggctcagtgttcttccgctgtctcccagtacgacgtccccaccgtcataattctcaataattctcggcttcacatgctcaccacagaaatccggcactgtatccagatgggcaatcagaccgatagccggcgcatcctcatatcccagtgttgccggcagtgtgccgtacacacagcataaatcactgacacgtgcatcttcaatgccaagtgccttcatttcaggaaccagcatgttcgccagatcaaactgacgctgggtggttggtgttgtctcactgaattcatcactggctgtgtggacaacgacataatttaataaacgttcataagctctcattctctatttcccccgcttcctttttatttcacgcagtaaacgtaattctcttttctaggcatggcttttggctcttctccatctgtatatcccagcacacagtggccaataccttcataatcgccttcaataccaagtgactttaagaaggccttgccttctgcggattcaaattcctctttggctctgtgaatccagcagctgccaatgccttctgcatgagcagcaagcataagattgcccatcaccagactgccgtcataaacataggttggtcttgctttatctgccagaacaatcagcacaaccggtgcaccataaaatggatcagaatccacacccatgatctctgcattcatcttcgaaaacttgtcacggatttctttattcgtcaccgcaataatgataggtgactgcttgcccatacccgttgctgcataggtgcccgcttcgataatccgattgagcacatcctccggaatcatatccggtttatattttctgatacttcttcttgtcttcatattattgataacttcgctcatttgatagaacctccatgataattcaagatttacccgcgcattttcatatgaaacccggggccgctccgcagacatagtgttcatccaaatctccgggccgctgttattaagtatacaccaaaaaacaaaaaaaagcgataccgttcaaatgaacgataccgcttttatgttgtctacatagattctatgtagtgatgattcataattagttaagaataccgatgaatactgaagagaatactaatgcaacgattgtcatcagtttgatcaggatgttgatagcagggcctgatgtatccttgaatgggtcaccgactgtatcaccaacaactgcagctttatgagcttcagaacccttgccgccgtgattgccgttctcaatgtatttcttagcattatcccaagcaccacctgcgttggacatgaagatcgccatcataacacctgttacaagggaacctgcaagcataccgcctacagcttctgtaccaagaaggaaaccaatgatgattggagcaacaactgccataacgccaggaataatcatttcacgaagagcagcctttgtagaaatatctacacactttgtataatcaggtttgctcttaccttccatgataccaggaatctctctgaactgtctacgaacttcctcgatcatagaatatgcagccttagatacagattccattgtgaaagctgagaaaaggaatggcagcataccaccgatcagaagaccgataattgttgtataagaaagaatgttgattgctgaaaggttaacctgctgagcgtaggacatgaaaagtgccatagctgtcagtgcagcagaaccgatagcgaaacctttacccatagcagctgttgtgttacctacagcatcaagggagtctgtgatttcacgaacggattcatcaaggtaagacatttctgcgataccaccggcattatcagcgataggaccataagcatcaacagcaactgtgatacctgttgtagaaagcatacctacagctgcaagtgcgataccgtaaaggccgcagcacttgtaagcaacaaagatacctacacagatcagtacaagcggaatagctgtggactgcatacctacagcaagaccggaaataattgttgtagcagcaccagtttcagactgttcagcaatcttcttaactgagccgtaatcaccggatgtataaacctctgtgataataccgatgatcagaccaacgatcagaccagcgatgatagcaacagcaggcatgatagaaccaagataatatacagacaatgcaatggcaccgataacaacaatggcatcagctgtatattcacctctgttgagggctttctgtgggttaccgccttctttgccctgtaccatgaatgtaccgataacagaagcaacgatacccagagcagataagattgcagggaagattgcagctttcgctgtatccagtgtgatcgcaccgaaagaacctgcaagaccaagagtgatagcagaaataagagaacctgcataagactcgaaaaggtcagcacccataccggcaacgtcacctacgttatcacctacgttatcggcgattgtagcaggattacgagggtcatcctcagggataccagcttctaccttacctacaaggtcagcaccaacgtcagcagcttttgtataaataccaccaccaacacgggcaaaaagagcgatagaagatgcaccaagggagaaaccgaaaagaacatctgcatcacctgtgattacatacagaccagctacaccaagaagaccaaggcctgcaacacacatacccataacggcaccaccggagaatgcaacattaagtgctttgttcataccatttgttcttgctgcattggctgttctgacattcgctttagtagctactgtcataccacaataaccagcgatgatagaaagaacagcaccgcaaaggaagcaaactgctgtaagtggatttcttaagaagcaaagaacaacgaagagcactacgataaagattgcaagaattctgtattcagcaaaaaggaatgctcttgcaccttctgcgatagcagaagcgatttctttcatacggtctgtaccggcatctacagaattaactctctttgtcaaaacaaaggcgaataccagaccgatgattgcgcagataactgcgacatacatgagattcataattaaactcctttctctttcttaaacatttaattttgagcataaattatgcagatgtaatcatacaatctgcatactagtcatgccttaaatattatccgattttttttggaaagtcaaccattaccattaaattattataaaaaagtattaaaaatttgcaaatatcgttgtttttttaacatggaaatatcaagattcgttttattttaattccagacgcatgtcaatcaattcctgatattcccctgttctcagacgaaaagccttcggatttcttccatattcaatgaatcctgctctcctgtacatttcaactgccctctcattctcagcaacaacttccagttccagctgaagatacccagcttctctggcacactcaatgcaggcctccatcagatactttccgatgccgagtccccagaactcctttgtaatggcaatgccaaaaaccgcacgatgcttgattttatcccgcattcccaaagcatcaatcccggcagtcccaaccacaacatcatccaccaccgcaataatttcaacgttattcgcactatctgttttcctctgcaaaaaatctgcttcctgagaagccgtaaaacaattctcatccaaataagtcagcagataatccgtctcctcatgagtccgattaaaaacatccagaactgccttcccatcactggtaacgccattcctcaaaagacagtttctgccatcctttaatgtaactgttttttcaaaagtcatgcctatactcctatcttctctccaacttcctcaaaatatctgtactatcaactattctaccatacctcttatccaaaagccatccttgtccacatatataaaaatatgccatcattaaataaaaacagccctacacctcaaaataaatcatacgaaccatttgattttagtcaaaactttttttgtcggccaataaaacaggcgtgcatcaaaaaacaacaaaatggaacctaaacgggcacattcatgtacaggtgcttctgacgtggccggtacttagatgctgtcctttagcatcttatgtaccgctgccaacggtgctgaaagtccagtggactttcgttagcaccgaccgaagtagcacgtagaccaggcaacgcgagtatgcctgtacatgaatgtgcccgtttagggttcctctattatgcatctgattgcacgccgtcaatctttcgtcaatctgcgtatcgactaatcaaggtttgtataccccatcagattaatgtccacacattttgcagcctctctaccttctctgatcgcccatacaaccagtgactgtcctctatgcatatctccggccacatagactttctcttcgcttgtatgataatggcccggttctgttttgacattggttctgccgtccacctctacaccaaaagcatctgtgacataactctgactgccaaggaaacctgctgcaatgagcaccagatcgactggaataatctcattgctgccttcgatttcatgcatcaccatacgtcctgactcagggtctttctgccatgacagtttcactaattctgcagcgcagacttcaccattatcattagcgacaaaggatttcaccgttgtctcataaattcgaggatcatgaccatataatgcaatggcttcctcctggccgtaatctgtcttgcagattttcggccattccggccatggattgctctctgcacgctgatccggcgctttcggcatcatttccagctgaatgacattctgagcccccagacggatagatgtgccgacacagtcattgcctgtatcaccgccgccgataacaagcacatttttacctttggcagaaatgaaattgccgtcctcaaaatttgaatccaaaagactctttgttgtcttcttcaggaagtcaacggcaaaatagataccttttgcttcacgacccggcacattgatatctctcggattcgatgcaccacaggccaggatcacgctgtcatattctttgagcagtctggaagccttataattattaccgatatccgcacctgttacgaattcaatgccttcttctttcataatattaatacggcgttcgatgaccgctttgtccagtttcatattcggaataccgtacatcaaaagtccgcccacacggtcacttctctcgaaaactgtcacctgatggccacgtttgttcagctgatctgcggctgccagtccggaagggccggaacctacaactgcgattcgcttgccggttcttaccttcggtggatctgccttcatcaagccatgttcataaccgtattcaataataccatgttcattttccttaacagaaaccggggctccgtttaaattgcaagtacacgctgcctcgcacaaagccgggcagacacgtgatgtgaattcaggaaagctgtttgtcttcatcagacgacgccatgcctgttcccagttgccgttataaatcagatcattccattccggtacaaggttattcagcggacagcccgataccataccgccgatcatcataccagactgacaaaacggtacaccgcagtccatacatcttgcgccctgcttctgctgcatttcactgctcagagggatatggaattcgttaaaattctgaatacgttcctcaggtgaaatgacaccccctgtttctctctcatattctaaaaatccggttggttttcccattgttatcccctcctatcctctcttgcttgcgtaaaatgcttcaatctgtgcctggtcaaatgtcagacctttttcttccatatggacaatggctgtctgcatatgactgtaatcatgcggtatgatcttcttgaacttcggcagatattcagagaagttgtcaagaatctctttgccaatggcagagcctgtattatccacatgcgcctggatcatatctctcagctccataacatcatatttggatgtcaccgtatcaatggaaactaattctttattgacacgtttatataaatctctgttttcatccagaacataggcaataccgccgctcataccggctgcaaaattcttgcctgtgcgtccgagaacaaccacacggccgcctgtcatatattcacagccatgatcgccgacgccttcaacaactgctgttgcacctgaattacgaacgcagaaacgttcacctgccacaccgctgatataagccttgccgcttgtggcaccgtaaagggcaacattaccgacgatgatattttcattggactcaaacttaatattctttggtggataaagcaccagtttgccccctgaaagacctttgccgaaataatcattgctgtcgccgcacagttccagtgtcagtcccttaggaatgaaggcaccaaagctctgtccgccgctgccgttgcacttcaccgtgtactgatcttccggcaatgtatcgccatacttcttggtgatctcggacccgaaaattgtacccagtgtacgatctgtattgcgtacattaatctcaatcttctttttcttcttacctgccagtgcagacttgaattctttcaggaagactttctcatcaatggttttctgaaggccaaaatcatagacatcctccggcataaacagatgtttttcttcatgcagatacggattctcaacaatggctgaaagatccagtttaccgtagatctgaggatccacatcttctctgactttgatcagatcagaacgtcccactaattcatccaggttatgcacacccagttttgccatgatctcacgcagttcctgggcaacaaatttcataaagttgaccacatattccggcttacctctgaaacgtttgcgcagttcagggttctgtgtagcaatacccaccggacatgtatccagattacatacacgcatcatgacgcatcccattgtcacaagtggcgctgtagcaaaaccaaattcctctgcaccaaggatcgctgccattgctacatcacgtcctgtcatcagcttaccatccgtttcaagacggactcttgaacgaagaccgttcatgatcagtgtctgatgtgtttctgccaggccaatctcccaaggaagacctgcattgtggatagatgttcgaggtgctgcacctgtgccgccgtcataaccggagatcaggataacctgtgcacctgctttggcaacaccggctgcaacagtaccaacaccagcctcagataccagtttgacagaaattcttgccgaacgattcgcattctttaaatcgtagatcagctgtgccagatcctcgatggaataaatatcatgatgcggcggtggtgagatcaatgccacccccggtgtggaaagtcttgtctttgcaatccacggataaacttttccgcccggaagatgaccgccttcacccggttttgcaccctgagccattttaatctggatctcgttggcactgacaaggtatctggaagtcacaccaaaacgacccgaagctacctgtttgatagcagaacaccggttaagtccatccggtccgatggtaagacgttcaagactctcaccaccttcaccggaattggatttgccgtggatcatattcatggcaatagccagtgtctcatgagcttcctgagaaatggagccataggacatggcacctgtcttgaagcgcttcacaatctcatccacactctctacttcttcaatcggaataccgccttcttcatcaaacttgaactccagaagacctctcaggttcatcaggcgtgtttcttcattaatattatgagaatactctttaaacatctcataatctccgcgttttgtggattcctgaagcagatgaatggttcttgcattataaagatgttcctctttgccgcttcgcatcttatgaccaccgatgctgtccagagacagatccacatccaaccccagcggatcaaatgcacgcatatgccatgtattcatatcgcgctcaatgtcttttaatgttatgccgccgatacggctgactgtattcgtaaaatatgtatcaatgacttctttgctgataccaatggcttcaaagatctgagagccctgataagactggatcgttgaaatacccattttggaagcaatcttgacaataccgtgaagaaccgctgaattgtaatcactgacagctgcataataatccttgtcaagcatatgcagatcgatcagttctttgatggattcctgagccagatatgggttgatagcgcaggcaccataacccagcagcgttgcaaaatgatgcacttctcttggctctgcactctcaaggatcacagcaaccgctgttctcttctttgttctgacaagataatgctcaagggcagatacagccagcagggaaggaatcgctacatggttctcatcgatgcctctgtcggaaaggatcagaatattcacaccgtctctgtaagctctgtctacttccacaaacagatgatccaatgcacgttcaaggggtgtattgacatagtaagtgatcggaattgtcgctactttgaatccttctatattcatggatttgatcttcagcagatctgtgttcgtcaaaatcggattgtggatctgtaccatcttgcagttttctgcttcttcttccagaagattgccgtccggtccgatataaaccgttgtagatgtcacaatttcctcacggatagcatcgatcggcggattggttacctgtgcaaacatctgtttaaaataagaaaacagtggcttcggctgattgctcagaacagaaagcggtgtatccacacccatggcagcaattggctctgcaccattcttggccatcggaaggatggtatcctttaactcttcatatgtatagccgaatgccttctgcagtctgatacgctcatcccttgtatattccggcacacgttcatttgggatcttcagatcttcaagcttaacaaggttggcatccacccattcaccataaggctggctctgggcatatgtctccttcagctcatcatcagagatcaaacggccctgaacagtatctaccagcagcatctttcccggacgcagacgatcctttaaaacaatatgttcttccggtacaggcagtgcaccaacttctgaagacagaatcatataatcatcatctgtcacataatatctggacggacgcagaccgttgcggtcaagcaccgcaccaagaagatcaccatctgaaaagacaatggaagccgggccatcccatggctccagcatcgttgcatagtactgatagaaatctctctttgtctggctcatactcttgtcattctcccatggttcagggattgtgatcatgacagccttcggcagcggcataccgctcatcatcagaaattccaatgtattgtccagcatcgcggaatcagaacctgaagaattgatcaccggcagtaccttatgcatctcacccttcagtgcaccggaagacatcgtttcctcacgggccaacatggtatctgcattgccgcggattgtattgatctcgccgttatggacgatcaaacggtttggatgcgcacgcatccagcttggattcgtattcgtactgaaacgtgaatgtaccgttgcaatggctgattcataatcctcatcctgaagatcatcaaagaactttctcagctcgcctaccaggaacatacctttatagacaatagtacggctggataaagaacaaacataggtattatcattactctgttcaaaaacacgtcttgcaatgtacagcttacggtcaaaatcaatgcccttggccacatctgcaggtttcttcacaaagccttgcataatgtatggcatcttgtccagtgctttctgtcccagtacggatggattcgtcggtactgtacgccatccgagaaattcaagaccttccttggccacaataatctcaaacatcttcttggcctgattctttctcagctcatcatgtggaaagaaaaacataccaacaccgtattcccgctcttcaccaatatcaaaacccagttcctcagtcaccttcttaaaaaatctgtgagaaatctgaagcataataccaacaccatcaccggtcttgccctcggcatccttacctgcacgatgttctagtgtttctacaatggtcagtgcatcctcaacagtcttatgtgtcttgatacccttaatattcacaactgcaccgataccacatgcatcatgttcaaaagacggatcatataaagccggtttcttctgctgttccattatcactcactacctttcttctatgtataaaattatcatttccaaaatatggtaacaaaaaaaggacaaaccacgcctgtagtagacgcctttgtcctttgctatgaaaaaaagatagcatattttataggcaatatcaagctttttcagcaaactctcaagtaatttttatttaattgagagcttgtggcgatgcattcataccgcttaaaaatacccgcatcatattaaaaagtatttctgaactgttgctgtttcattgtaattaaaattgaaacatattccccattttttgaggtgttttttatcattttgttgtaatttataatgaaacacattaatttcagtattaatttagcaattttttattgtaattcatactgaaatatatgattttttgacacctatattttgccgtttcattgtaattcatactgaaacaagttcaaccacctatacaaacaattagagaaaattcttgagtacttcagctttcctcatgcacattcttaatctgaaatatttgggatgcaaaaaaaagacagaacattttatttcgttctgcctttttttcttaccacttataagtaaaatcaactcctatatcttcaagcattttcttacgctttgaggataattttaattttttatcttgagctttttgagaatttatccatgttttaagtctattcacctcaacagcatcatactctattacatttttttcattgagagtctcaatgtattgtttgtatgcttcataatttctcatccattgattttccgaaacttcaaagtcaaatcctattttctccaacttttttattttctcttcactcaacttgtgattcttatattgtaccctttgcatgcttacccagtttcttaaatttattcctttatactttgcttttttagaaaaatccatattaccaaatttttctttatactcacatagcagcatataatttctatcccaccttgaaaaagcaaccttgctcaaatcgatttgattagcaggcaaaaaagaaaaaatttcagatggtgtggggcgctgtatttcttgcattatatgtattgtaagcatcttccatgtatttccattttcttgatctaaaatatcacaccaattacctttacatttcataatcctatatctatgctctgaaaatacatccaataaatcttgtacaacacgccaatcaattaattccatacactttttacaacgctgacccttctcaaatcgataaatatcatatatttgttcacatccacatttattatgccggataacaactttttttgtttttgcattaattctaaccaatgaatacgaatttccaacgagttccgctattcgtatcttatatttatctatcagcttcgctaccggatagcaaaaagggcacctcggcttttgagcaaaataaaaataattactctcaaaagtttttttacatttttcatgtaaaatgtgaactatcgatgtatctgattcatattttaacagcttaaaccctttatgtgattctatttttgtttttatctgtatctctcgtttatgatctgcgcagggacatattcgcttaccatatagatagtctccagcagtaacacgtaatctttctccacacgttttgtgtcttataataacgttatcactaagatttttaaactctgattccaatacatattccccctgatgcatagaagaaaatatatcttcaagccttacaggaatgcttttctttttattgcaataaggacatccccatccattattctgataaaatggcattgatatgtattcttttccgcaaacttggcactcatataattttgtcaacggctcctcatatggaatcgcactaataaagtcattcggatctggatataaatacataattactggcagtatactggacattatctgcggtaatctattcttttgaaaaaataaattaatatctcccttaaaaagagctgcatactgccattttttaaattcatcaatccacttttgacgattcttcctattatacccagaccgctcaatgcatgctaatagtagacttctcacactttccaaatttgtccatatttttgcttcaagcagctttacagcataactagtataagctcttaaaatctctatatctatttccgattgacattcctgataatcctcaagattaaaattcatctcatttcctggttttccattatattcaagcaaatgacagccatgtttatggcatgtacaaacaccagacaattgatgtgactttcttatataagggacctcgtcttcagcaatacattgcggacatatctttaatgttgtgaaaaatggataccatgatcgatttaatttgtctgcaggccagaaaacagcctgcagttttttcaattgtctctcctgtgacataccaaataattcaaaacagaatgtagatgtatctaaatatgtatctatactgcttacattgcgatataaaaatccatgtaatgatacccattcattctgtacatcaggcttcaaatattttgccttgctaacgctacaataggattctaaaaaattgctcattgataaatgattcatttttgctaaacgccataaccatgaatacaataattcatccggaaaatacattttaaatattggtaaaaatcccatttgcaatacctctttcttttaactcaatttcaaaaaattctccatttgagtcctatctgtaaaaataggcttatttttgcttttctgtttcgcattattttttttctgcaatcgatcaataaccatacgcgttatttctttttcactctttccatttgctgcatcatttctttttacttgcttatatgcgttcataatttgaatttctgaatattcatcatatattgctgtaatattagctgcaacattagacaattgtatatcatcctcattaattgaattatccgattgtattaactgcatttctctatcttgactttccttgtcgatcaactcttgtatcctatccctcgcattgcgttttatttcttcatattttttatcctgatcaggtgttctaatcatttttaacaaatcctgaataccagggtaatatttttttgcaatgttccggatgtactttccattaatctccggttttgtctttctttccaagtaatcataattgacacacatataaatgttaatcaactgatctacaattccgcgtgtcacgtcatataatgcatctattatatcttctgtaactggcactgtatcatcaaaccattgatattgaaaaacctgtttcactaaaaaggcaaaaaactctttattattacaatatcgattgacatcaataacctgtccgattcttctcgcagttcttaaatgtacaaacattttgtctctcgcatcttctgttccaataatcaccattgcaacttttgtctgatttgcaagcaacatcaatgattcaaaactattttctcgcgtatgctcaaaatcaattaattgtatctcgtcgaaaatcagacaaccaattgaaaacatttcaatatactgcttaattttctccgccttcttaccaagattttttccttttgccatttctgttgcatatacaggtaaaagattaccaagcgcacgatctaatgcagctcctatagcctcatacagaactgtaaagttgctgtttgctgtacagttaacaaccaaatatacaacttgaggataacaaccaccatttccatcatcatgcataataacctgcggatagcgtgataacaaaatactgagtgcagaacttttccctgctcctgaatagccaatcatggataatcccgctttcgtggcatctgctggatcaccggtcaatattctgtttatacatttttcctcattttctacagtatacgttaattcctgatttgacgcatacataactctacgagaacgatatgacatgcataataccgtataaaaatcatattcaagggcacgatgaaacggaagaggcatacgaagttcatttaaagtgctaatctgcatcatcttatcaaatttagtcattttcttcacgtcatctttcttatagcctactaatattcttttatattccctattaatatcctcatgtcgtcttggaaacggcaatgcttcaatgtatttattgccctgatctatttctaattttgctcgtacataaatagcatccactgttttgttttccgtcaaatcatattcctcatattgagatttaccttcttcgatttctatatattcaaaattcttcttcatcatctttcaattcctccatttcccagaatctttccatagcatcatctgcattcatatcatcatatctcttgtttttcttacccctatcatcttctgcaatctgtagctgctgattctgaacttcaagattttttgctatttcaatctttccttgacgtgacaccctttgcttttctttttccctctcttctctaatacttttctcatcagagactgccatttgcctttttgctatggatgcagcaacaatactttcattcactccctgtgcataagctttcacattatgattatatactcttcctctggcatccatttctcttcgagacttaagataatcttcccactctttcaatgtataattttcaaattcctgatttcccaccattcttgtgttaagaggcactttcgccagtttgccggccttttcataataaaccgcaccaacataccgtttatctattctcactataaagacttctcgcttattacccagctcaaacatttttcgtaggagttcatcatcatccgatggaaaataccataactttttgtattctatccccctcctgctaatttttgctttaacaggtgataacaaccgatatctatactgttctatgtctgagattggtcttggatgtccataacgttctacaccatacttccacaataatgctggaatcggttttatctgtttctgctgcatattctttgtcgttcggtaatattcattataggtttgattgtgatttaatacataattgattaccattgcagtatattgtcttatattcagactcgcctctttatggtggtgcgaatcatatcgcttttcaatcaatccatgattctctatatgttccctttgttccgactgtaaacgatgaaaagactgctcaacaaccccctttaaagatcccatggcccccggtacaatctgcttttctatccctaattctatacaaagacgatcaaattcttttcctttaaattcggctcctcggtccactctaactcgtcttggaataatattggaaggccaaatgtcatctcccgtatatgtaattccatatcgtgcacaatactcatgcttattatccgaaagatttagaaacaaatttgtaattcccaaagcagaattgttatcaaatgaaacggatacagccaatattattcgagtataaacgtcaatcataaaatacacgaccggacgaccgactgttttttcgggatttacttctgaaacaagtgaaatatctacttcacatgcatctatttctactaaatcgcccggcccttttacgccatcaagagaatcgctaagcaacaaacgatgatcatttctctgctgttctgctgatgtcttaattctatttatctcttttcgtgtcaatcgtttatgtgcgtaataataaaactgataaaaagtaggtcgttctgattctggttttaatcttatcgtttgctctccatctataacatcagtagatgaaaaataaactctcatcatatgaacatatacactctgaaagcttttccatctaccagatttatattcttttattccccaatcaaaaatttcttttatatcctctgtaactattatccccgctgattccagatacttcgattgtttccctggttttttactatatcgtttttcttttttattttgtaatacaaacactttctgatcaagcaatgaatactctcgcatgccgctttgaagataatttcggataattctccatatcttggattttgatatatggtatttttccataatctcatataataccttttttttctttcttcccatcagttccatatagtcgggaccatattctttttcgatttcatacataatttttcgattttcctcatatttgcttcgaacagaatctgtaaaactactaatatcaaacactttactctcgtcctgatacaattcaacaccatcttgagccaaaaattgaataatcaactcttgatcatattccaaaagaattaatttcgtatcttccattttgcagacaacaactttttcattggatatataaataatccgatattttgtacctgttactctgtcattcataaccatacccactgttgctattatttccgtcattttgttttcacctcattaatatcatcaacctagtatctgattatttgccttgccatatcagccgttaattccgcatgttcaatatcaattttgagctctttgattgcaattttatgtttaaatgcactataccaatcaaaaacataactggaatcataaaattctgttacaagacgtatattatgcgctagtaccttgttcacatttctttttaaaagtacatcaaatttaattccttgcttattccaatacattttttcaatacaaagcaactgtaactttctctcactgataaactcatccgattttacactgtatgcatgcaaagttccatctgcctccgtcacaagaaagtctgttgtcataacctgtgccttatttcttggatattgaattcccatttcttctgcaattgctactgtcttatccacatctagtggatactgttctctgatatctacattattgtcgtcccatctcaaaatgtaataccataaagtctccccctgtgaaaggcaatgtacacctcgccccgttttccaatctttaataactgatgttgttcctctactattaaattcacttgttgtaatgtacggtatataatcttttccttctccggtacccatttttcttttctttttcgtttcatccgacaatctgcgtgccataacatcaccttcctaaaaaaatccctctacatttattatcggattttcaatttctcttccgcacattttctatacttttccattcatttatgagtcattttaattattaagcattcaaacgacttatttttgaacgtttaatgacttttatgacataaaaaaaattcattttataaattttgtgttatccttaaagaaaacaatggagtataaacaatgtcagatactgaaaatacacaaaatcaactgtcaaatattgaagcaggacaaatcgaattactcactgaaaggataatatctaataagccatcagatgccgaaataatatacaataaacgtaaacaccttggattaacgcaaaaagaatttgcagataaaataggttgttctttatctacaattgcccgaatcgaacgtggcatatctcccatctcagcaaatactcaaagaaaacttgatgctcttgatgtacaaaagcccaaagaacttcctctggaggaaactttttcccaatctctcagtaaaataatcatacgaaatggctataacagtcttggcgctctttacaatattcagtgcattactgacaatctaatcaagatgttttctcctcctaaaatggacaaagatgatgcccgccgttatttacaatttttaacactgactattgactacgctacaagattatgttttgaagaacagcaagctattaaaaagaagcaagctgttctattttctaaacaaacggcaggttcacttgcatatatacaaagagcagatcgtaacctttttaatgaactacagaaaattaattctgaaactcctgaaaagaaataatccatcctattattactatacacttttttgcttgcccatcagttgatggttctgtcaatctttgaatttttatagaagaagcagataatttcatacaaaatcttttcaaagaagccatgggtattaaataaacttaaaatacaccattttggaattgaattccgaaaccaattgaaccacaggttcaatgacaaactaaaaaacctcctgtacaatggacatcagtaaacaatgtcgaatagtacaggaggtattattatgtctgaaaaaatgctcgttacgcaggcccttgacgaacgcgacctgcttgtaaagaaaatcaatgataagatacaaaaagccagctttgttgatacgatcaagccgaatgttgagctggtttacaataaacggatcaaaaaggaagaattcaaccaggccgcttcatctgcctatcagcagatcatagacctcatcgcacgttttcagaccattgatgcagcaatcatcaactctaatgccaatactaagatcaccacatcatatggcacttatactgttgcggcagctatttcactccgtagcaggatgagaaacatgggtgcctatgataacgaggccaattttgaagacagacttcgaaataaattaatgcaggaatacagcagccgtgtatgcgtctgtgacaaggaaaatgcaaagttgaaggaaacagcagattcgatgcgcttaagtatcctgggtaaagatacaaaagtcaaagaggacaaacctctggctgtcgttgatgcctatatcaaagagaataccacagaactagttgatcccctgtctgttgaaaagttgactgcaaagctggacgaaaaacgtgacaaattgttatccgaattagatacccagatcaaagtcagcaacgcaacaacattcattgaattttaacatcactgcctgtagtgcgaaaatctcaaacgtgtcttccctgcagttggggtatagctgtcattatatacactataatggaatcagatgtacatacagaatgttgctttctgccggcagtaagctgccgacgggaagcaaatgttttgaagactataaaccgtcaccgtgttttttcatatgtattctgttaagtttcaacaaggaaatctttaatcatcaactttgaaccgaaaactttcctgcaggcatacgctgtatgctgaaatccatgatcagcggtttggtgttaaggcccttgacctgagatgatccccatggctgcactataggcatttattctactgccgcatacactgcggcttttttcatttggaggaattgaaattgaaaaccgttaaagaatggctcaatgagatcaatattcagaaactgattggttattatcagaccatgtacccggcttatcttgatgatacacggctggatgagatgatgacaatcagacagtgtcgtgacctggaacgctctaagctgccctcgatacagatgcatataggctaagaggcataataaaatcggccaacctgcagtacgctgattacaagcgattcaaagaactgtataaaatatatcgattattaaaatcataaaaccaatcaagactccatgctacataacgtatccacggagtctttccattacatattctctatcactttctaatcttcatcagcataaattttataaaaagcagaagcaatatatttacttcaatacgattcttttataataattgcataccttttgaattaacttactatttgagcatcccacatcagcagcaatttgccttatcagcttttcatcaaaatcaaaatgttctatgtaatactctcgtttatcccatgatggatgaataaatccttcttcatcttttttctttaatgccctcttataacgaacagactctaatagcttttgtttggaactatgaaccattttttctgctgctccataatcagcatgaacctcaccgatttgaagcataaacttataatccgttatgcttagtgtccaagaaaaataatctttttctttatgagttagttcatgccctattgttataaaaaaggcattcactgtatcttcgttattaaaaaatacaagtcttattgcccatcttttattacataaaataagatgaggaaccatagaactagaatttaatacagaatcagaattatataaccaagaaaatacaatcttgtcatctgatatagtattgaccttttgagctttttctaatatcttttcataatcactcggaacttgataatgacaccgttttgcctctttaaaaatttctcttttgatcaatggacttaacataatagctctccttttgtaagtccattataaatacttccatatttttatgcaataacttttattaccatccaaaatgctataaatactaaataataacgtaccaatggaagctgtacctcctcacttggccgagctaaaccagtcgatagcaaaatgcctcccgttatgtatatcaaaataataaaagataatataccaataattacacttactatattaaaagaatccctataacaacttaatgttaataaaaatgcacttaccatagtaatacagacagcaaaagtccaaatatatggaaaatatccttctttttttatagccttcggaagaaaaagaatttccatcagcgtataccaaaaccatattaacatattgattacttgaagtgctgtaataatcacttttaaaaccaaatatttcaccctctttttgccattcattaaatctaatatggtatattctattgattattaaaatcctgaaataaaataagactccatactgaattaaacagtcatggagtcttgtttgctacagattttctaccatttcatcttcatcatcatacaatccggtaagtgcccaatgcatagcccttttcatccttctgctgaattcccaatccggaacatcttcctctgatgataaaaactcatgtgccaatttttctacttctgctagtccctcctcatctaattcatctacctcgtcttgaaaatcttccactgcatcaacagccatcctagccgctgccaatacccttccggctaattcaaaagaagcagattctcctgctgctatgaaatcatccacagcctgcttaaatacattcataccctcttcgtcaaattccattacgagtcatatacccccttttataatatataacccctgaagagagcattttgtgacaagttctttactatttctttgctaaaatcaaaaattctcctatgtgtttttaataatcattttgttagaaacaatatgttttacatttttatcttttattgtatattgccacggaagaggatttgtgatatatggtatattttccactcttataacttctactccactgctatatacaaaaacaacatatttaatctgatttctataaccatagatatattccagcattgccttatcacgacttaacctataatccaatatcctttcgattaccttcatcttatttttccacctttcctgagtaagctgcaataccaccgatattatttactttagaatatcccattcgttgcagcatcccagttgcctggcggcttcgtgaaccggactaacagtatacaaacagtgggatatccttattcttcgctacagaagcaatattttcaagttgctgcaacggcacatttttactttctggtatatgtccttcctgatattcctgcggtgtacgtacatccagcagaactgcatcatcagtcattttatattcttctattccttgattaatattcgactgtttaaagagatcaaaaaatcccattagcacacctccctaaagcatttctaaaatcgcattcttaggtctcgcccctgaaacctgctgtacaatcttcccattcttcataaccactaaagtcggaatgctcataatactgaacttatttgccagttcaggctcttcatctacattaatctttccaactttaatatctctacgctcacttgcaatctcctctacaataggtactaccatgcggcaaggcgcacaccaagatgcccaaaaatctaaaagaacgggtttatcggaattcagtacttcgttctgaaaattatttttattgatattaatagcagacattttacagtcctccttatctttttctttttgtagatttattatagtcttaatttcatttattttccgtgattacatcaccatacctcattaacttaacttcttgccataccatctacacttaatataacacctgtaatgtaactcgcctcatctgaagcaagaaacacaaacgcattggcaatatcttctggctgtccaagacgacgcaatggaattctttcaatcataggttcgataacttcctttggcacggccttcatcatatcagtttctgtaatcccaggtgcaacagcattaacacgaatacctttaggtcctagttctcttgctaatgatacagtcaatccgtttactgcaaactgtttatgatacactaaaattaccagaaaaaagcgttaaaaatccctgaaatcggcaagggattttcctcaaaaaaggtttgaaggatacagttaccagcatgtcaagcttcctcctgcttttagcagggaggagcttgaatcactggaatttgtgcctgggcagaagaaccttgtactatacggccctgttggagtagggaaaacacatatggcaatcgctgctggtgtgaaagcctgcaatcttggatataaaacaaagttttatacagtaacagaactggttctgaaactggcggaatcccgtaaaaacgggactcttgaaaagctgctccgggatttacgcagcctggatctgctgattctggatgagtggggatatgtaccagtagacaaggatggctcccagttactatttcgagtgatatcagacagttatgagagtaaaagtctgatactgacaaccaatctggaattttccaaatggggagggatattcactgacgatcagatggctgctgctatgatcgacagactggttcatcatggtcacttactaatttttgagggaaaaagctaccggatggagcatgccctcatgcgtcaggatgcataaaacgtcctgcctaaagcagggaaaatccctcactaaaaacagggaattctgacgctttttttagggaaaagtgcttgacaaaaaacagtactacggaatcatgaaggcaagaaagcgtctgtaaaaagagatcgaactgtgatatactgggagcgatagctccctacgctgctctgataatcacacacctcttcgtggtgggcagcaggcaacgatcttatgatcggcgaagatgtgagaagaaaatatagtaaaatatgaaggagaaatcacatatgaatttagtacaacaatttcagaatctatttgatccttctacggcgttgggggcatttttgattagtttactggcgggagttgtgtgttcatttttgcttggtcgaaaatatcaaaaagaaattgacaagaaaaatattattgaagcaaaaaaagctaattcaattattcaagatgttcgtaaaactggtaaatcagatttagcggatgaaaaagtaaaaaagtctaatagtataaaggtcggaacagtaactggcacaatcaaacaggatgttgaagaataaggaaacgtactatgctgaaatatgcatttgataaaataaagggattattccggaaaaatggaaaacagaatagtatcgaggttggtactatggaaaatggaaacatatatcaggattcggtagttaaaattgaaaatccggcaatagcaatcagccatataaaagataatccagaggatttaaaaataacattagattctatctcgaatgtgctgctaaaaccaggtaaagccttaccgcaaggttaccaagttgttgtgaatatgaaagacggaaaatccgatatacatagtgagccgttaaatgaagaagcacgggagcgatatccgcagaaagtaaaagcaacggctaaaattgttattcctgttggtatgtcatttcaagaagcattaaatagagctaggatttcgcaaacgcctattaatgtcgaaatgcttgatatgcaaaagatgattggagataatattgatccctatcaggaacaatttcaaaaagaatggagagagaatatatttaaaattgttccagaagaattaccagcgggtatgaactgtgtgattggaatcgatggtattccatataggtatgatacagttatgagaatacaaccagtagatccagatgcgggcataattaaaatatctaatgaagaatactcaacggattttgttttagccttgacgtaccatgtggatacaagagcaacagatttcacatatcgattttctggaaagtcctggaaaagtatatataaattttttaattttatgaaggcagcggttccaggtaatagattgtttgtttgtgtgacagaacaaaagcaagatttatttagtgtaaaactgaatcggattttgtttgacgatgaatatgacaacatcaattataatatcgatattgccaaaagactgctaatgattgaaaatcaatatggaattcaattcccaacggatcaagagccgtccgatgaagatatagaattaataggatttttgtctaatagcattatgaataaaccaagcggatttacatgggataactttaatgcgacagcaaattttcatgtaatagaaccagatggaataaatagtgatgctcgtttagaattcaaagaaacagtaagtattacaatattaggacaaaaaattactgacttgcttgtaagtgttgagcttgagtcagttagaattgctaatttagatagtataaaagaagcagtcaaaacacataaaaccgaacaaattcaaatttctctagtacctggaaatagagggaatcatggaacaagaattgttctattataaaatcaacatatgcttttggcaagttttaggtgcaatattataaaaaaggaaagaggtcatcacctatgcccagaacgaaaggcagcaaaaaacgtcccaaaactacccataccgactacgcatcccagattgcggagaagcaagaaactgttgcatctctgaatactgagatcgcatccatcaccacaaacattgatactttgaaagctgatctgaaagagaagaagactgctctgaagaaggctgaaaaagaagtggccaagcttgaagcaaaaaaagccaaagcagatcagaaagcagcggaagaagctaagaaggctgaagcagagagtgtggttaaaaaattattagccagcggtgtgagcgcagatgagatttttgagaagctgaaataaaacaagaatccaagagaaaataaatgccgtgtggacaaactggactccaggagttcacacggtatattttgagggggaatatatagcttgtgacgaaaataaaagaaaacaaaattaaaagaaatggagcgtgatacaaaatgaacttatcaaaaatacaccacattgcaatcatcgtatctgattacgaagcagctaaggatttttatgtaaacaagttaggcttctctgtcatcagagaaaactatcgcctggagcgtaaggactggaagctggatctgcgagtgaatgagcacactgagttggagattttcgctgaagaaaacccaccgaagcgtgtgaaccgaccggaggcctgtggtctgcgtcaccttgctttttgtgtagagagcgtggaacagacgctgaaggaactggcggaggtcgggattgaatgtgagccaattcgtgttgacgattataccggcaagaagatgactttctttcatgacccggatggactgccgctggagctgcatgagtaaaatgaagaaaacgagaaagcccggcggtggccggaagaagctgaagccggagtacgatgccgggaagaacctaaaagagcagatggatgcggctgtggcgctttatgattctgagatgtccttgcaggccatcggcgatgagctgggattaaatcctattaaagttagaaagctgctcatcacggctggtgtgtatgaatcggaagtggcgcagaaggtacaggatacttttgaagaatatagaaaaacaaaagactacaaaacctccgtactctcaactgcaaatacccttcaactctccaaggcctcagtcacctcgtacctgccttataaaaaaggtgtgtactttccaagtacagagaaagaaaagatcagtgtcggagcagagcggcagcgaagatacagagcaatgaagcggtggagggttcatccgacagaagaaaacttctggggtgtggttctggtctatgctggggtaaaattcaaaacctactctgggttgccatttacttatgaggtgaggaaaggaagaagcggcgaatacacaaaagagctgtggatcgacagacgggagaagagcaaaagtctggcgtggagttctatagttttggcgctgaagaatattaaaggggaggtagtagaccgcccgaaagctctgggggacatccggggcgtgacttacatatatggaatgttctaccggttcggcttgattgatgtgccggacgaggtaaaggagaagatgggccatccgaaaaaacgcaaaaaataggttgctatgtacaggagtgtgcggtaatatgtgccgtaactgaggatgtgaatctcagttgggaaggatggtagcattatagaaaaattgaaggaaatgctggaggagtattagaagaaaacagagccggaggattacccgccagtggagaatctgctaaatctgatctacgagcattacacggagaacaacccagtagagaaaaacatagttgccgggaaagcagcaaaggccaaggaaaaggaactggaagagtggctgcgtggcttggaaggaatggataggctcgtagatgactatgttggcgataagatcccattctgggaaaagattatggaccggcaggggatggtgtgctgcacatgggagaagaacgcttttgaggaaggcctgaaagtcgggatacggcttatgatggaagcgcatagtttgtaacggaaataaattgaactccaggagttcaaaaaagccctcgcttgttacggcgaaggcgtgtgttcttattcttcaggcttttcagcttttttcttcttcggtgcaattttatgaccggagtagattgccatacccatgcagaccagagagccacaagcgaaatacttgtgagccttcatcagcttcttgcagcccgtgtagaagcatcctgccatacaggcaagtgcaccgagtgatcaatatttatgtgctttcattttgtgtcctcctatatgtttagatttctccgtggtggtgtgccacggagtttatttatgccttgacgtacttttgctacttactacgcggtttatctggaatagtcattttcagctgtccagaagctaagagcggattaagatattttgttctgagatttttccggtccgatagcttaagatactcaagcaattcgtcacgggaacgaggaacagaacagaatgctagtattttatcttcgaccgtagcttcatcatgaggggcatcatgaggtggggggagttgtcctgcctgctgatgcgcggcaacccacttctgatttttcaacgtagtacacagcataaagctggaaacgtgatattcttgatcaggcagtccggcgtcttccatttcacggtacatacggtcaacgccctcgccgaactctttcacatattcatagacattcacatattcatagacatgcaaaaactcgatgattttggggttgcgggagaaatgcatctcatgcatattattgggaccaaccaggccgggcagctgaccgggactttctacagtcatgtggtcatcgaacattttaatctgaatattggtgccggtaatgttgtagttgcgatgaacaatggcgttaacaattagctccgtccaacagaactcagggagttaagggatggtgacgaagagaccattttcgccgagaaacgagtgctcgcggatctggctctttacaaattccgtggacttctgtaccatattgcctgtttttttgccttgtctttttttcccgtagggattgctatgtgcagagtcctgttatatgttgtgggtggcgagaaatagacatatgacagaaaatacacatagcgaggagtgtttgaaatgaatgaggtagctgggatgctggcagagaaatatggtgcaacagctgatgagattgtggcggccggtgctatgaaattatatctccagagcatggagccagcagagacgctgagaaaggtgagggctgtgtatgagccaaaagtaatctggcttgacagtggcgaaggcgtgccggtataaagcaatattgatggtgcaaagtacgctgcgttcatcgatgagaccataacgtttgctgctcagaagatattgagtgcggaatgacaacgttcaaagttgtatgtatgcacatatttcccaatagccttccttgcttctcggatattgttgtattgggtcagatatgcttcctcgtactaaaatttacatgaatcgtagagtgaaaaaagcagcatgatcagataacatttacagaaatgacttgcaataaaggaataagttggttaaaatatttagagtgaaagtcattaaaaataaggacagccattaagataaattgtattgatgaaatatacatgggaggcagaaagttttgaaaacaacattattgattatggcagcaggcattggttcacgttttggcggcggtattaaacagctggagcctgtagatgataaaggacatattatcatggattattcagttcatgatgccattgaggcaggatttaataaagttatctttattattcgcagagatattgaggaagagtttaaggaagtcatcggtgacaggattgccgctgtctgtgcagacaatggtgtgaccgtggattatgccttccaggatatcagggatattccgggtgagctgccgaaggatcgtacgaagccatggggaaccggacaggctgttctggcagcgaaggaattgatcacaacgccatttatcgtcatcaacgcagatgattattatggtaaagagggattccaggccgtgcatgattaccttgtaaaaggcggtaagtcctgtatggccggttttgttctgaagaatacattgtcagacaatggcggtgttactcgaggtatatgcaagatggatgcagacaacaatctgacagaagttgttgagacgaagaatattgtcaaaactgcagatggcgcagaagcagatggtgtcaagctggatatcgattcactggtatctatgaatatgtggggactgacaccgaaatttctgaatgttctcgagaaaggatttgcagcgtttttcgagaaagaagtgccggcgaatcctttaaaatcagaatatttaattccgatttttattggtcagttgcttgaaaaaggacaggtggcagtaaaggtattaaagaccaatgatacctggtacggtatgacttatcgagaagatgtagaagctgtcagagagagttttcgcaaaatgcttgctgaaggcgtatatactgaagaactgtttggtgatttagaggataaataatttgaaggctttttctaaagttgaattttacgatcgcgttttatggaagaattatctggcggttatcggtgttgtcggtacgattgtgacattgatttcattttttgtaacggccgaagagattgacaggttttctgaaaaacagctggctgcttttttggttgctggactggtgttgatattttctgtgatgtggtatagtgccaatcacagaaagcatgcggtgaagatgattaacaatacgattgtaagaattgcagagggcgatatttttgagctgatggaacgggatccggataaacgcatcgacgagttgtcggtcattggggccaatgatttttatgatacgctggtggatgatcgaattgtggccaggaaaacgctgcatgggcagtatattgagcaaatcaggaaagcaggaaaactgaaacagttggagagcacgatagagcaggacgctttattaaataaaccggagcattgtcaatgtgtaccaggcagacaagcaggaagaaaagtcagatatcctctgggcagtgtcgtagaatttgagaattatgtactgactgcttttacaaagtttgatgaggataataaagcttatttatccgcagaggagtatgtgggattctggatgcagttctggaaaaatattgatgagatttatgcgggacggacattaaatattcctttaatgggggcaggaattacgcgctttcgagatggaaagccatcaaagcaggaattattggaagttatgctatggacgctgaaaatcagtggtttccataatacatattcggatgggaaggttaatatcgttatttatcggtcagatgtgaaagatattgatttttaccatatccagcataatttaagcctggaataagtagccaaataagaatacatatgataaaataaagctaagagattctagtattaatctaaaggcctatggcctttggttctctgagttgagttcagagaatgaaagattgctgacattcgtggcgagttaaaggactcgaaccgatgccagcattggttcgagtcctttaactcgcttccggtttaatgtagagtctctttttatttttatagttggtaagagaagatggatatactggaagataaggtaatatgtcaactgattcaaagcctgaaagtcaggctgagaaagaagacgatttcgagccgggaacagccttttttatcggcaccaaggctgatatttgtatgcggcaaggagtgggttgacagtgaggagacaattcgtaattatacgatcagaactttgagaaaatgtagaatagcgaatcactatggtacacagaatgaagctgttctgtgtattattgcagagaaattgtatgtgcaggatctgtcggaggacattttttcttttgagaagatgttggcagaaatcagtgatcgtattatcattgtggcagaaagcccgggaacattttgtgaattgggtgcttttgtaatggatgaagactgcagaagaaagaccatggtgattaatgaggacaatgcagattatgagaattcattcattacaaaagggccaatcaagaagctggaatcattgaatgaaagcagtattatcaggcacaatggcctggaacggatcaagaacagccatgagtataatttcaaagtgcaggagatagccaaggcaccgttgacgattgctattaatgataatgcgggggctgttgaattaaaaagcctgatctatgaattggccaatatcgttgaattatttcagcctgttgagtattttgaaattgagacattatataagcgtttaaaggattttgaagggtatacgattaagaatacagcggatcacaagatcagaagtatccggcaggtattatcattgatggagaagatggatatgctgcttcgacaggatggttattatattttaaataagaatatttcctgttacaatgtgatgtttcgaatttcaaggaaagaatttaatgatttcaggattatgtatcttaatcgcctgaataagtgtcagaagagcagggtggatgtattatgagattgagtgagaggattgcgaagggaattggtattgacgaatcttatgtcactattattgcatcccgcaataatttatatgcaaaatattatattccgaagaaaaatggacgctatcgtctgatcctgcagccgtctaaggaattaaaggttctgcagcgctggcttctcagaaatatttttgcttattttcccgtatccgaatacagttccgcatatagtaaaggaaattctgtcagaaagaatgcagcggtacataaagaaggaagatatttgctgcatacggatattactaacttttttccaactatttcccgaacaatgttgaagcagtattttcaatccaatgagagtctgacgagaaagcttgggatggcagatgaggatattgagttgatcctggatatttgcttatatagaggtgagaatctggttgttggcagtgtggcatctccgcagattgccaatatgctgatgtatgcatttgatctggaattgaagcaaatgctggatggctttggcagttttcgatacacccgatatgcagatgatattgttatttcatcgatgtctttcatagatgaacaggttttgaagcagacagaacagttaatgatcaagtatggtttcaagatgaatcatgaaaagacttattatatggggaagaatggtaaacgccaggtgacagggattgttctggataataatcgcaatgcattaacgatcggtaataagaaatacaaaaagtttcagcgtatgctctatgactatcttgtgaagggccatggagatttgggatatattaaaggctatttggcgtatatacaagaggtaagcaggcagcagtatgaccagttggctgaaatttataaaagatatgatatagagaatgttttatttcataatgcaaatggcagataaataaacgaaggagatcgagagatgaaatatgattatttagtagtaggttccggtttgtatggtgcgatttttgcccatgaggccaaggttcatggcaagaccgttttagttgtcgataaacgtccgaatattgcgggtaatatttatacagagaatattgaaggcatcaatgtacataagtacggtgcacatatttttcataccaatgataagaaggtctggaagtatattacacagtttgcagagtttaaccgttttaccaacagcccagtagctaattataaaggagagttgtattcgctgccgtttaatatgtacacatttaataaaatgtggggcgttgtaactcctgaggaagcagtagccaagattgaggaacagcgaagcgagattacaggggaaccgaagaatcttgaggagcaggcaatttcactggtcggacgtgatatctatgaaaaactgattaaagggtatacggagaagcagtgggggcgtgactgcaaagagctccctgcatttattatcaaacgtttgccggtgcgtctgacatttgacaataactactttaatgcactttatcagggaatcccggtaggcggctacacaaagatgatagaacgcctgctggaggatattgaagtgcgtttggacacagattatcttgaacagaaggcggagttggatgcgttggcagataaagttgtctataccggtccgattgatgcttactttgattataagctgggtacacttgagtatcgctctgtccgctttgaaaatgaactgcttgacaagccgaattttcagggcaatgcagcagtgaactacacagatcgagagacaccttggacgcgtatcattgagcataaatggttcgaattcggcaaggatgagaatggcaatgatctgccgaaaacgataattagccgtgaatacagcagtgagtggaaaccgggcgacgagccatattacccggtgaatgatgagaaaaatggtgcactttatgcagcgtataggaagttggcagatgcggaagaaaaagtaattttcggcggacgtctgggtgaatacaagtactacgatatggatcaggttattgcggcggtacttgagaagtgtgagaatgtttttggtttatagattaaacaataccatggattcgatgttcgaaagcaatacctatgtatttcgcgacttgaaaaagagcctgagagagattattgctgaagaaaaaggtatggtaacactggacagtcaattcaaatcaatcgatatcagagatatttccgataactatcggttcataggcggcaaagagcaatgtactgagttcgtcaaaaagtcattggcatctatgccgcaggaacgctgtgtcaataaaacgatacgaagaacatacagaagggaagatatcccggatactgtgtttacaaagtcccatcgggatgtggaatattagtgtgatttctttgaaaaagtaaattcctttcaaatcatgtaggaacagattataatgtttttactggccaacatcatgttggcatgactttgagtatttgcatcatcaattagatatatcgcgtatatatttttgagaaggcatggaattgatgatgtattattcagatgtggtgactaaaaatatgcagtccatcgatggattttctcatatctgtatatccacagacaatgtagatgttttccagaccggatatatcgcctaacacggaaactccttcagaagctgaaaagctcttgaaaccggcgccgggtcagcaccattatagatacggattgaaaataccgaagtggtgatctcaactgtaggggtattaccagagcgtatggcatatggctgcgatatatcctgaggttcagccggctggtcatggacaatagagacagggacaacatcctgcttttgacggggtgtttctgagtggccataagaaggctgaggtatctggtcagctgcgatcttacggcaccgactgagccagttataaaaagtgctgggagtgatatcattttcacgacaccagtcagcatctgtcatgccgcttttgcggcattcattgataagtctaatctgttcctgtaatgggacacgaggtttgcgagtagctgccataatatttcctccatcttgtagtaatttactctaattgtagatggaaaaagattagggtgcaatccgcattattatttggcgcttaccttttttctcttatttccgactcctattgcgatgtcggaactgtgtgtttcaaattcaatgtgtttctacaattggaaaatattaagctataataataaaagtttccaaaatgggaaaataatttgatattctacgtataatatgctatattgagaaaaaaggaggaatgcagatatggttgaacgaaaagaatatcttgaccagctttgggcatggaaagacgagcagcagatcaaagtcgtgaccggaatccgtcgctgtggaaaatctgtacttttggaacagtatcagcagagactcttagcgaatggagtcatgccagaacagattatttctatcaattttgaaaatctggattacgaacctttaaaagattatatgaagctgtacaattacctcaaagaacgtttgtgtgcagataagatgacatatatctttttggatgaggttcaggaagttccatcattcgagaaagtggttgacagcctttatattagagaccatgtggatgtttatatcacaggttccaatgcatatatgctgtcaagtgagcttgcaacacttttgtcaggaagatacacagagatcaagatgctgccgctttccttccgcgagtatatggtggtgacaggtatggcaaaagaggaagcttttgcagagtttatgaaaactggcggaattccgtatgtggcagtaatgaaccgcacggatgaaaaaatagatcagtatttggaaggaatctataacaccgtcattgtaaaagatattgagcagcggcaggcaagaagagaaaaagagggtggaaaacgaaaaatcacagacattgcgctgctaaagacaattgccagatatctggcaagcgttatcggcagtccggtgtctatgaaaagtataacagactacctgacctcagcgggaaggaaagtatcccaaaacacagtcagtaattatgttgaagctctgacagagtccttcattttttatcccgtggagaggcttgacattgtgggaaagcagctcttaaaggtcaataataagttttatatggtagatatgggaatcagaaaccacattcttccaagaaagcggtatgatcttggatttaccattgagaacattgtgtatcttgaactttcacgaaggggtggcaaagtcaatattggaaaatgcggttctactgaggttgactttgtgacacagaaggaaggggtgcttacctattatcaggtgactgctgatatgacggcggaagaaacctttgagagagagatgagaccgctgcgtagcattcaggataattatgaaaagattgtcctgacactggatcgattttcactcggaaattacgatggcataaaagttgtgaatgtcatcgattggctattgggatgaggaatctgtggatgcgtcgtcaagtttgaaggaacttccagatgaaattttgaaaatcacagatgaaaaactgtttgaataaaaataagaaaaggatggaaacagcttccagataaattgtgagtaagagtattttcggcagaaaaagggacgcatatctttagtattttttctgctcgatttcagtaggtttcaaaaatatccattatatttgcttccggctgatcgaaaccggcattacgaatcagctggaaacaaatatttgttcttttaattccagaaatgcttctacatatgcatacttccatcatcggaatgacggttccttcaaaacggaattacggcttcataagtccggatagtatggacacggaagccgtaatactcaaccatgtagaatcctattgtaaagcaggtagattacatctacggatatatttttttaataccaggctgttttctaatattttaaggcagcatgctaagcgtgaaacgacatcttcttgtgataatgaaaggcgcttggcaatgtcttcgtctgatagtgctggtttgtgatttagttcgaacttataaatgataatttgttggtcaatattatctaattcagaaagtgcaatagatatatcttcattatcaacatatgaatcttcatgattagagtaactggtctgatcaacaaaaacttgggtagagtcacggaagatcggattatttatacgacaaacagcaagcgtgtttctgactgttctttcgggtaaatcagtaccttcagagattttttttataagcgtatccgtatcgataaaggagttaacatcgttaaaacaatgaagatcaatgtcttcgtgggaattggtgtaatttaaaataatagccattttcctataataataattactgacgttgaatatattttttgcaatataggtgctggcgccatgacggatacgagaggacataaaagtagtaatggtgcctttttcaggtaaatatttttctaattccagccagactgctgcttcggcagctgaacagagttcgtcatagtttttcatgaattttggaaatttctgttttacatgttggcgaataaaaggacgattttcagttatgattttttctttttctgctggtgtcataataagtgtctccttttctggtgcgcaggtaattaatacctgaggggatagtgacatgtgtattatatcagagtctaagaggatgttggttgcatatcgtgaaacttaaaaaaaaaaataaatgccaatcttgcaccttactaagtgatagattataattaatattaaggatatcttaaatatcatccggaagatttctggatgatattttttgttaagaatagaattctgattcggaggataatcgatgcgaggtgcatattccgcaaaaacagagcactcgctccgcatgagcggagcgctgttccgctagaaacggatcattgccctgttggttaataaagttacttgctttctacacgtctatcagaggttatacaggattttgtgttaagaacgatagcatttgctgagacgtcatttgattacatgttggttataaatcagaagtgtcaatatctggctgaagggatgacgtataagaaaaaaagagctataatgaaaagaaaatgcagcaatcgattatccatataaaatctgatggaggtgagagacaatgggcaattttgtaaatccaggaaatgatgcgtttcaggcaacattaaatgcaaaaatatatgttgataagagtggattgcttaattataccaatagtgttttggcatctacggatgcttatatatgtaatagccgtccaagacgttttggaaaatcaattacggccaatatgcttacggcttattacagcagaggttgtgattctgaagaaatgttttcacaattagaaataagtcaatcaccagatttcaaaaaacatttgaataagtatgatgtcattcatttggatgtgcagtggtgtatggagccggcaggtggcccggaacatattgtatcatacatttcagagcagacgatcatggaattaatgatgtattatccggatgtggtgacaaaaaatatgcggtctttgccggaagttttagcgcgtattaatgctgcaacgggcaggagatttgttatcattattgatgagtgggatgttgtaattcgtgatgaagctgctaatttgaaagtccagaatgagtatattagttttttacgtgggttatttaaaggaacagaaccgaccaaatatattcaattggcttatttaacgggtattctgccgattagaaaagagaagacacaatctgcattaaacaattttgatgaatttacaatgctcagtccgagtgtgctggcaaagtatatcggttttaccgaagatgaggtacgcaagctttctgaagtttatcatcaggattttgaaaaggtaaaaagatggtatgacggatattttttgaatgattaccaagtttataatccacgtgcagttgtcagtgttatgctaaagggtgaatttaaaagttattggtcagaaacagcgtcctatgaagccattgtaccccttattaatagaaattatgacggattaaaaacggctattatcgaaatgctttctggaagtgcagttaaggtcaatacagcaacatttacgaacgatatagtcaatattcggagtaagaatgaagtactgacttatatgatccatttgggatatctcggatatgatcagtcaagaaagaatgcatttgttccgaatgaagaaatcaggcaggaattgatgttggcagttgagagtagggcctggaatgagatgcagttgtttgagcaggagtcagaaagtcttctcgatgcaacattagatatgaatggtgaagcggttgcagagcaaatagagaaaattcataatgaatatgtatctgttattcagtacaataacgaaaattcattgagcagtgtgctgacagttgcgtatttaagtgcgatgcagtattattttaaaccggttcgtgaattgccaacgggaagaggatttgcagattttgtctatattccaaaacctgaatacagggaagattatccggcgatggttgttgaattaaaatggaacaagaatgcaaaaacagctttggatcagataaaaaacaagaaatatccgcaatcagtattgaattacacaggggatattttgatggttggaattaattatgataaggaaaataaagaacatcagtgcctgattgaaaagtacaaaaagtaagatacggtatatatcaagccattcgttggaggaaaaagatgattcattatgtggtgccgcatgctgacagcgggtatggattcgatgttcgaaagcaatactttgtatttcgtgacttgaaaaagagcctgagagagattattgctgaagaaaaaggtatggtaacactggacagtcaattcaaatcaatcgatatcagagatatttccgataactatcggttcataggcggcaaagagcaatgtgctgagttcatcaaaaagtcattggcatctatgccgcaggaacgctgtgtcaataaaacgatacaaagaacatacagaagggaagatatcccggatgctgtgtttacaaagtcccatcgggatgtggaatattagacagtagtttaacggactaagatgacaaagcagattgctgagtttaaagcgtcactgaatgacccttagttttatccagataacagcatttttatggattttatctgggtgttatcagcatttaatctctgacttttttgggggtatccaacgtcattttgacagtatgccaaaatcttacgattcgctttttaccccattttccgttaaaatagaaggagtggcagttatgtgcaaagtaatggaagatatgagaaatgaagcggcaaaagaagcagcaagaaagaattcgattgagacagcaaagagcttgcttttgcttggaaaattgacgtatgctgaaatagcacaagctacgaaacttacggttgatgaggttgaggaattggataagaaaaagagtgcataattgattctgaacccgctgacgtactgtgtaaattctacagggtgcgctggcgggcttttttattatatgttcaacgggttatgacgataagatgacaaagaagattgctgagtttaaaggtaaagtgttactgacctcatgagctgtcactgtattgctctcatgaatagtcgctacattgcttaactttttgtcatcagctcatccagggctgccgcctgttttcaggcggcaataagcatttacgttgttatggttccaagcatttcataggaatataagaatacacaaagaatgaatgacattttaaatgacaatcctgcggctctatttaaattgagtaacagcatcttttgttgtattccgttttatgctagaatagaattgagttatgttaattattggaataattagcgaaatatgaagagcaagaaggtgaacaacattggcacgaaagaatttttttgaattgctggaacgagaaattgattttcaaaaggaatatgagaaaatcgaagataagattatcaatgatgaatttatgctgagcctggaagctgtgatagaaaaagatttcagtgactggccgttccgtggaaattttatttctttctgggaattaagatgtcatttgggttttacatatacggaatcagatgtttatggggaagattatgaaccggatagaaagcatatcaagatggacgattttttgctctattcagagatgatgttgaatatgatgcagttattggaaacaaagcatgaactgacatatgcgtccaagatccggttggtgaaagacacgattttgtatgatctggaaaaaatcaatcacgaaatggtgaagcaaaaggatggtcggctgattattgttcagaaagatgcagcagtttcagcggtggtagatttggtagaacctgatctggctcagattattcttgagtatcatcactaccttttaaaaggagatttgggagcgaagaaggacatattgcgaaaattggcagatgctttagagccaaaacgaaaggaacttgataatctgaataaaactttatgttctgatttctttttccttgtcaataaaatgaatatcagacataataattgcgatccgtcagataagtcaaagtatgttgaaaagtttgataagatgacaaagcagcaaaaagaagcgtggtatgatggtatctttcaacaggggctgatgctgttcctcacaatcgagcaggcaaagcggacaaaggagattgctgggtttaaagcggcactgaatgagaaataatggcagtgaataaaaaggacataattgaagggaagattttgtatgctgaatatattttatggcgatatgaaggaagcagtttacaatacagcttcttattttaagtatgattatgaagatgactggataacagatccgtttgtaaaagagatgattcaagatgtagatcagtctattgttctggatagtggtgtgatagacagtccggttctgggaaaaattccgccaacaggcttatccggtggggtaaagacattaattcttgtgaaatttgataaggataaaatatttaatgcatcaacttgcggagacaattgtgcaaaatggttattgaaaattgcagaaaaagaggacaggataattaatcttcatcatttgatgcggtttggaacagaaccgtttacgattcgtgttctgaatacgaatcaaattgttcattcaatggaagaattggtgtcaatagcaggggagtttgtctgatcgacgggagtggtgtgtgatgaaaggaaaacataaaattatcgtatcaacaaagcggttaaaatacgagtttgagcttcaacgtaatttgaccattattcagggggacagtgcaaccgggaaaacgacattagtcgatatgattcgagattttgtaaataatccatcgggtacgccagtagaattaaattgtgataagaagtgctacgtgttggaaggcgctttatggaaacaacagttaactggtattacagatggtattgtttttatcgatgaaggaaacgaatttataaaatcttcagagtttgcccgggaaatccaacagaccgataattattatgtgattgtaaccagagaatctttgcctgctttgccatatagtgtggaagaaatctatggaatacgaacatcgggaaaatatggctctttgaagcagagttatcatgaattttatcgcttatatggagcagatacgtatgagaatgaagtaaaaccggaacttgttatcacagaagacagcaactcgggttatcaatttttttctagtgtttgtaatgaaaatcagttgaattgcgagagcatggacggaaaatctaatgtatttcattttctgaatatgcatagggatgaaaaaattctggtaattgctgatggcgctgcgtttggatcagagattgataaagttcttcagttgatgtatggaagaaagaatatagcgctatatctaccagagtcgtttgaatggttaatcctttccagcggaattcttaagaacagtgctttagatgaaatattacgcaatccatcagaatatatagaaagcaaagaatatttcagttgggaaagattttttacagcgattttgattgaagagacaaaagacagttatatggcatacgcgaaacgaaaaataaatcctgtgtatttagagaagacaatgcaacaagctattttaaagcagatgcctggaataataatgtgttgacgaacaaatgttcttatggtatgataaagacagataaaaggtggcggtaagtatctgatcagacgggagtgtgtagtatatggcagacttgaaaagattaccagttggaatggatgattttaaggaaattcgtaagtcagaattttactatatagataagacgaagctaattgagcaggtccttgaaaattggagcaaggtaaatctttttaccaggccacgacgatttggcaagacgctgaacatgagcatgttgaaatgtttctttgaaatcggaaccgacacgacattctttgatggtctttatatttcaaagaatcaagcgttgtgtgaagaatacatgggcaagtatccggttgtgcttttatctctgaaaagtgtagaagggcttacatttgaggaggccagagcttctttgtgcgaattgattgccggcgaagtgagaagatttaaatttttagagaagagcgacaggttggatgatgatgaaaagaatgcctatcatgatttgatttttattcagaatttaaaagaggctatacttggaaccaagttaaaattttcattgaaaaagatatcagaattattatataagcattatggacagaaagcgatcattctgatcgatgaatatgatgtgccgttggacaaggcattccagcatggttattacagagaaatggtgacattaattcgtggattgtttggtgaagcctttaagacaaatgattttctccagttcgcggttttgacaggttgtcttcggatttcgaaagagagtatttttacagggcttaataatttcaaagtttatgcggcaaatgatctccggtatgatgaagcattcggctttacgaatgaagaggtcaagcggcttctggcggattatcacttagaggaacattttgcagaggtcaaggaatggtatgacggttatcattttggcaacgcagatatctattgcccgtgggatgtgatcaactatgtagatgatcttgtgtttgatccgcaggccaggccaaagtcttactggatcaacagcagcgggaatgagctggttaagcgatttattgataaggcagatacgaccaccagagatgagatcgaagagttaattgccggccatgcagtcaagaagcggattcgaatggatctgacctatgatgaggttgataatacgattgacaatgtgtggagtgttttgtttacaactggttatctgacccgggaaggccgtgagatggatggtatctacaggttgatcatcccgaataaagaagtgcgggaagtctttgtgcttcagatcagggaatggtttaaccgtgttgttgcaaatgacagagcatccacggagaagatcaatcgaggattccttgaaggcaagacagaagatatccagcaggaactgacgcattttcttggcgagtcgatcagtgtattggataccaaggcaaggaatgaggaaaaagaaatcttttaccatggcattttgattggcattttgaaaaataatgccaactgggcagtccgttctaacagagagtctggggatggatatgcggatatactgattaagccgaagaatccggatacggggatcgtcattgaattgaaatacgcccgttcttttaaagagctggatcaagcatgtgagcgggcacttgaacagatcaaagatcgcagatatgatgaagcgcttcgtgaggatgggcgtaatgaggttcttgcctatggcattgcattctggaaaaagcggtgcaaagtggtggttgataagatatagaatcctgtaagaaaatcccgtcaggtcgttgtgacttgatgggatgcgttttagagtgaggtaattgtcatatgaattcgaggagatattttgaaattatgccttctgaaggtgagaagaaatttacactgcctgtgaatgagcatcaggtgatttttcaaaggtatttggatatgacatatcatgtgcaggaactggatcagctgtatcggatgatgttatataatcttgaaaaaatttttcgggattataatttattatttgatgacagggtatatacttataacgggcaggaagtggatgtgcttcagctcaatgctttgatagggaatgccatcagttcggcgcgtacattaattgagtcggttgaagtttttgacaaggcttatatagattcggatggaacatttaagacgtattatatttcaaaggcctatgacaaatggatggcatatcggatggtggattttctgagaaattatatgcagcatggacatgttccgattagttatgatggaaataagatttttttgaatctgactgaaatattggatgtccatcatatgaggatcaacaaagcgttaaggcagcaatatacagacgtttatgctcagttgatggaacagggcgctgtggagacaaggttagcgtgtgtttttccgttgtatcagtattttcttctggtacataagttatatcttgatttttggcgatatgcggactggactttagggcatatggacgaagaggttcgtgcaattgtggcagagcatccggaatataggcagacatttgatcaacatgcatttgttccggtgtattgtgatgcggctggtttaacgcatggttttgatttgaatgcggatttcctgggggcattggatggcatcaagaggctggcagaagaaaagtatgaggcttataaagcttccaatgggaatctgttgattttgacgatggattattgtctggaaaatagggcgccggagatgctttttgtggatgattcagtgctttcgaataatctggtggaatattgcagagaacacggccagaacgtacatcacatttcttttgaaaagcattatggtagcatggacatgcacacagtacatgaaatgttcccatatattcagtttgaagatggcatacagtggaatgtaccatacagtgatgtaacaattgcggattttatccggacttttccgaatataaggcaaacaggtatttgtgcgcaagtgaataatgtggcaggtgggggtcctttggggcatctcattatgcatggatggcatatgattatggacagtgcggcatacattgcggagcagatgcagattgagtcggcaatagatgttgttgattggatatcaagggctgaatttgttgcctcaaaaatgcggttgctcagacaatctttctcacggcaggatgcacataaaccagacgtacactttttgatgcactacattcgtcaacaggatcattggaatattattgagatgtcccaaaatatgaaagcgaagcctgagcttttgaaaatgttgttggagaatcttggttatatcagcggcgatagcattcattatcagtatgatgccgaatgtgctgaaaaaatgaatcagtatcagaaaaaaagaaaggttgagattgaaaatcgccacggatcagatgtggactgttctgcaatgaatcaagcggtgatgaatgccaatgcagatgcactctattattgtcttacttttgatgtgaatcaattaccacaggcgtatatggaacgattggaagatgatagggcatatgttaattgggatacatcttccaaatcattcaaaatcatggaaccattgccgactgactgttccattcagaaagtgtatgatatagcggaaaaaatgaatcagatttctaaagcaatggtacttcaatgtgaaaagggaaaatgcattgacgaacaaatgttcttatgatataataaagatagattaaaggtggcggtaagtatctgatcagacgggagtgtgtagtatatggcagacttgaaaagattaccagttgggctggatgattttaaaaagatccgagaaaataagttttactatatagataagacgatgttaattgagcaactgcttgaaaattggggagaagtaaatctttttaccaggccacgacgatttggcaagacgctgaatatgagcatgttgaaggctttttttgaaatcggaatagatacgacactctttgatgacctttatatttcaaagaatcaagcgttgtgtgaacgttatatggggaaatatcctgtaatttttctgacactcaaaggtgttgacggattaacgtttgaagctgcaaagtatcgcctggcggaattgattggtgctgaggcagagcgattcgcttttttagcagagagtacgcatctgacagagaatgagcggagtaaatatcagatgatgattcatttggagagtggtaagtactcggcagatgaggagatgctcgtatccagtttgcaaatattgtcgcagcttttatataagcattatgggcagaataccatcattctgattgatgaatatgatgtacctcttgataaggcatttcagcatggctattacagagaaatggtgacattaatccgtggattgtttggtaatgcgctaaagaccaacagttttctacagttcgcggtgatgacaggttgtcttcggatttcgaaggagagtatttttacagggcttaataatttcaaagtttatgcggcaaatgatctccgatatgatgaagcatttggttttaccaatgaagaggtcaagcagcttctggctgattattacttagaggaacattttgcagaagtcaaggaatggtatgacggttatcattttggtaatgcagatatctattgcccgtgggatgtgatcaactatgtagatgatcttgtgtttgatccgaaggccaggccaaaggcttactggatcaacagcagcgggaatgatctggttaagcgatttattgacaaggcagatatgaccaccagagatgagatcgaagagttaattgccggccatgcagtcaagaagcggattcgaatggatctgacctatgatgaggttgataatacgattgacaatgtgtggagtgttttgtttacaactggttatctgacccgggaaggccgtgagatggatggtatctacaggttgatcatcccgaataaagaagtgcgggaagtctttgtgcttcagatcagggaatggtttaaccgtgttgttgcaaatgacagagcatccacggagaagatcaatcgaggattccttgaaggtaatgtagaagatattcagcgggaactgacacattttcttggcgagtcgatcagtgtattggataccaaggcaaggaatgaagaaaaagaaatcttttaccatggcattttgatcggcatcctgaaaagcaatgtcagctgggcagtccgttctaacagagagtctggggatggatatgcggatatactgattaagccgaagaatccggatgtcgggatcgtcattgagttgaaatacgcccgctcttttaaagagctggatcaagcgtgcgagcgggcacttgaacagatcagagatcgcagatatgatgaagcgcttcgagaggatggacggagtgagattcttgcctatggtattgcattctggaaaaagcggtgcaaagtgctggctgaaagattataaatttgtggtacaatacctgacttttggagttgaatagtaaaatatggtgctaagccaaggattaaagcttatggcttagcatttttttgatctctccatcgctcagaaaataggacatcagtggcaggttgcaaagggatatccagcaagttccagggatttttttatgagatcctcattcatagtgactttaatttttccattcgtatcgtttccttttttgtctgtagtggtaaaaattacatattttgcagagtcaccgtattctgagcgctttgcctgtgaagctttcagcagttttgcttttccaacttctttattaatctcatatatctgcttcttggccagtttgggattaaaagtaacaattctttttttctgttatcttaaattttttaattttttctgtttcagtgtctttgaatttatattcaaactcatctacacattccttgatacggtataagttccttttttgttattagtttttttaagaaaatacgccataaaatcacccgcttatagtacaacaccatagcaccatatatgtaaggggtgaaaataaattttgtcaagtttttaaagtgaatgcaagaacaaacattcgaaaaaagcactgtacttttcagccttcagatgttatactaatggcatactaaagatcagaaatacagattggcacgaaaggatacagaccatatggacaattctgctgcaaggaacaaatggatggatagagaggccctggagaattacaggcatgcgatgcgtatatgctgtatgaatgcattgcatgtctgttcggatgaggcgctttcagagttgtgctatgatctggatatcagcagaaatggggatgcgagagcctatgagcatcttctgggcggccaatgcatggtgattacttcagaacccggaggcgggaagtcctatttgatgtggctgctgctgagggattatctggaggactgcagggatgattcagatcgtctgccggtgtttcttgatggaagggattgcggtattgtctgggattcgattgagaaggggattgtgagagcactcagcgggcattttcccctagtcactgaagaattagtcagggagcgattgcgtgcaggcgggtttgtcatgctggtggatgcagttgatgcgcagtccgagaccggcagttttttactttctgagctgtattgtctgggccatgacacagacagtacggtgatcattgcttccagaatgcagtgtgacagacgagatttccattcggattttgtgtattatacgattgatcctgtcagcgatgagcagattatccggtggcttgagcgtgatgcggctttaaggatgattggcggagacgagaacggtcagaatcgtgaaaaccgacgaatgccgggacggcttctggaagtacttcgaacgcctttgtttattcgtatgtatgcgatgacagcagtacattcagcagtgcattccgatgactggacagttttatcgaatcacacggcgcttctggaagcctatatagatatgagaatgaagtctatgagctgttcaccggagaatcgggacaggatttttgctgttttgtgcgaatatgcagcggatagttatgtcaatggggatagtgaagaacgttttttgaactgggagcggtcagagatttgtactcagatagaggcagctggttttattacacggcgttcacagactgttcatttcagatacagcgtatttcatcagttctttatggcctgctatttatcgggactcagcgcggaacagttgaatatatggatggatgcccataaatcggacaagcggtatgatgagagtatttgttatctggcgggcattttggccaatcactgtagtcagaattggattctggattatctggagcagaacaatctgaggctttatgtgaaggcccttgcgtacggaagaaattatgcagcgtcggaagtaaatatcaattttgaatatgcctgtcatttctttgcgcgtgttttgagaacgtatgagtcgatcattcagacacattttgacaatatttatcgtctgtttgatggttatagtattgatgatactgggaaggtatgtattcgcgggaatatgaatctccggcagagaacattgtcggtgtgcatgtacaatggttcagcggaggcgaagacgctggaggctgttgtatccggaggcagaggcatctacaggatcgaagataagacaggggtatcttttgattttgaagaacatatgatcaggaacaggagagagtattgctatgacctggatttgctgaccttggggccggatacggcaagggagattgctgtggatatgatcagagatcagacgatgcgtgccatggacaggaagaatatatttgacggacatgtcgatgtgctgttggcggaatatacggagagtaagctgaggagactgcgcagtaagcggtggacagggaacagtgaatctattctgacattgtatacaggtgattatgaccggattatacatagactggaacagctgagtgtgacgaacatcgagattaatgtttgtgccagcctgactgcactgataaggtcaagagtcgatgatgtgacagaattgctggatatccggccggatctgccgcagacagatttaatgctgaagcagggaaggcattctgataggtcggaggcggcctattcggatcggcagttattgaagaagatacagagaatatggacgttgtcggatgatgccatacgaaggattacgacagagattgtaccggctttgtcagcagtcagacagcccgccaggaagatcggctgggtctgtcgcggtgatggattttccggcatccgttacatagaagtgaagacagatgagggagaggatatctcaccgattttagaattcctagaggatgctgacagaatcggcactttcggggatttggcttctgcagctgatttacatggtaccggtcaattgcagaggctcggcaagtgtgagtcggatgtattaagagaaggaacatccattttgcagcgctattttggtgattatgtattccatagtattatctataaagaagttaaaagagattttgagcgactgtttggcagacgataaatttcaacaggacatttcaggaaaggacttgaagagaatgatagagacaatcagactttttgatgaagatagccaccagaccttgtttgaggggtgcgtattatcttgtgagcaggatggtgatttatataagatcacattgaaccagacaatgtttttcccggaagagggcggtcagagctgcgacagaggcacactcaatgatattccggtggagaaggtactggagaaggacagagtgatctaccattgggtgaaggaaccgctgtgggaaggcgatacggttacaggttgtgtcgattgggagaagcgtttctcagatatgcagcagcatacgggcgagcatattgtatccggacttattcatgaatacttcaggctgaataatgtaggttttcatttgggaagcgaagccgtgaccatggattttgatggtgtgatcaccagggaacagctccgtatgatcgagcataaagcgaatgaggcagttgcgaagaatcttccggtgaagattacatggccttcaagggaggaactgatggagattccttaccgcagcaagaaggagatagacggaccgattcgtattgtggagatcccgggctatgatatctgtgcctgctgtgcaccccatgttcattttaccggcgagatcggcatgatccggctgacggggatggagaagtacaaaggtggcgtgcgcattcagatgctctgcggtttcagagcactggcagatgcccttgagaaggaacgtaatgtttatgatatttccgtgcagttgtctgcgaagccttatgaagtggctgctgcggtagagaagctgaagaatgagaatctggcgctgaagcaggagatgactgggatgaagatggatatcctgcaggagaagatcacagcgctgccggagaatgaacagaatgtatgcttttttgataagcatatggacaagagcaacatgcggtatgcttttaatcttctggttgagaagtgcagcggcctttgtggatgctttgacggggatgatgaaaacggttatcgttatgtgatgggcggcagagatgtggatgttattgcagcaggtaaggcgatgaatgaggcccttgatggccgtggcggcggttcgaaggagatgttccagggcagtttgaaggctgcaagagagcaaattgaggaatattttgctaatctgtaaaaaaaccataaaattttgcagaatgccattgattttttcaaaaatatcattataatagtaggtacacttgtttaatataggataatgaccgtattatcgttatgctttattaaaaaagtgtttttattgacgatgatagaatatgaaagaggtacattcaatggatgaagctgtatttttgcagatcttgaatagtttgctggagaaggcaaagaagaaaaaaaatgagcttgattatggcgacatcaatgatgcgttcaagggcttcgagtttgacgaggagaagatggaagaagtttacgaattcctggaagcgaagaatattgatattatcaatattccggaagcacaggatgacgatgatgagttcctcgatcaccaggaagaagaagttgaactgctggatgatgttgatgcactggaaggtgtcagcttggaagatcctgtcagaatgtatctgaaggaaataggaagtgtgaagcttttatcccctgaggaggaagttgagctttccaagagagcagaagcgggtgaccagaaggccaaggatagaattattgaagccaatcttcgtctggtagtcagtattgcgaagaagtatgtgggccgcggcattccgttcctcgatctgatccaggaaggcaacatgggtctgatcaaagctgttgagaagtttgattatgccaagggatttaagttcagtacatatgcaacctggtggatccgccagtctattacccgaggtattgctgataaaggtaagacaattcgtgtgcctgtgcacatggtagagacaatcaacaagacattgcgtatgtccaggaatcttttacaggagctgggaagagaacctaccagcgaagagattgcagagcgtcttggaacaaccaaacagaaggtagaagaggctcttgagatttcacgtgatcctgtttctatggacagcccgattggtgaggaagaagattccagtctcggagattttatcgaagatgagaatatgctttcaccatctgattcggctgactatcagatgctgaagaaggaactggtgaacgcactggatacgttgacagaccgtgaacgcaaggttattgagcttcgttttggcctgatcgatggacaggccagaacactggaagaggttggcaaggaatttaaggttacgcgtgaacgtattcgtcagattgaggcgaaagcgctgcgcaagctgagacatccgtccagaagccgcaagctgaaggatttccttcaggagtaacagggattgcttctctgctgcggatgagaggactgccggaaggcagtttataatgatgagatctatatagaatgctgcatatgtaggcgtttccaaatatggagccgacaatgcagcatttttttgcgagtctacgcgagtaatgagctaaagcccctgtttgcacaggactttggcgaatagattcagaggtgaacagtatgatttttgacacacgtttttctgagaaggaatcgatacgctatggcgtggtggatggcacggcaaccattgtgaagtatgaaggcgatgagatgcgtgttgtgattccggcgtctattgatggtttcaaagtgacgaagatcgagtcctatgctttctcggagaagtctatgaagtatattcagtttccggatacgttggaggtgatcgaccatcacggtttcagtgaatgcagggaactgttgaatctggattttccggattcactgaaatccattggcaattatgctttttataattgctgggcattggaacaggtgcatttgacagcccatatccgctctattggttttggtgctttcaagaactgcgagaagctttcagagattgttcaggacaagattgaagggctggatatcagtatcggtagtatcctggatgatttgaaccagcagattcacgtgattgtgcggcatttatacccggataagcctgtggaggaggccagagttatttttacggagcatgattacgaagtggtcgccaatgtggcttccatgtgtaagcagtttgagtctacggagattggttccggcaagtatatccgctactgtatcggcatccaggatgtggattataacaaatacgatgggatgttctatgtccttttaaggggggattcctttgatacgatcatcacggtggctatggagcgtctgatgtatccttatgcattgacgttggaaggcgagcatacgtacaaggattatattgcagaacacgctttggaagcggcgaagaagtttattcaggaggatgacaaggacaagctgacttttttggtcgatctgggtgtgcttgacagtgatgagacagaccaggccattgatctggcgctgtcacttgacaagacagaatttactgcttttctgatggattataaacaccggaatttcagtatggcagatgagtcctttgatttataggaggttttgacatgcatgagatgaaagagaagctgatcaaggccggaactgacattttgaatgcttccaagacagaattgtatgtctctatgcgttttttggatattgcactgaatagtctgggttatgaaatggatctgtccatgaagacgatcggtacggacagtcagaagattcgctttaatccgagatatctgatagagaattatcagaatgacagtgtgctggtgaatcgggcttatctgcatatgctgctgcattgtgtattcagacatatgtttcataaccgtgacaaggatgaagatgtctggaatctcagctgcgatattgcagttacagccatcattgatcagatgaattaccgatgtattcggcttgttgtaccggatgaacgacaggccatgtatgaccgactgaagtcagagatgaaggtgctgacagcagagggcatttataagtcgctgaaaaaacggcctctaacctggcttgagatggaagcggctaagaagcagtttgtggtggacgatcatgttttctgggattcggagcaggaggatcagaaggatggcgacggccggaatgatcagaatcagaacaacgaggacaatcaggatgatgagaacaatgatcagaacaatcagaacaatgacagacagaaggaacagaaagagcaggaacgtaaggagcaggagaaacagtggcaggagatcagtgagaaaatgcgcacgaatatggagacctgttctaaagacgcggctgagatggctggagacctttatgactatattaaaatagctacaagagaacgttatgattacaaacgttttcttcagaaatttacaacgcttcgagaagaaatacgactggatctggacagttatgattatatttattatacatacggtctgaatcattatggcaatatgcccctgattgaggcccttgaatacaaagaagtccgcaagatagaggaactggccattgttattgatacgtcagagtcctgttccggtgagtatgtgcgtcgttttctggaggagacatttgccattctgacaaataaggacaattttttcaggaagatgaatgtacacattatccaatgtgatgccaaggctcaacaggatgatgtgatcacctctgaagaggacatgaagcgttatatggagaattttaagcttatcggtttcggcggtacggatttcagaccggcttttgagtatgtcaatgagctgtgccgcaagaaggtgttcagacatctgaagggacttctgtattttacggatggctacggcacttacccggccagacgtccggattacgatgtggcctttgtttttcttgaggaaagttataatgacagacatgtgcctccttgggccatcaagctgattcttggaccggaggatatacaaatgggaggattagaccatgaacattaaacaggcaaaggatgagatcaggcataccgttcaggcttacctgacaaaagatgcactgggagattatgcgattcctgtggtcagacagagaccgattcttctgatcggaccgccgggtatcggcaagacagctattatgtcacaggtggcaagggagtgtggtgtggcactggtttcttatacgattacccatcatacgagacagagcgccatcggtctgccattcatcgagaaaaagaatttcggcggcaaggagtattcaatcacagaatacacaatgagtgagatcgtagcgtctatttatgagaagatggaagcaaccgggctcaaagaaggtattttgtttatcgatgagatcaactgtgtatccgagacactggcaccgactatgctgcagtttttgcagggcaaaactttcggcaatcaccagattcctgagggatgggtgattgtgacagccggtaatccgccggaatacaaccagtctgtcagagaattcgacattgtcacccttgaccgtgtcaaacggatcaatgtggaagaaaattatccggtatggaagacctatgcttatgagaaccatatccatagtgcgattttgtcttatctggatatcaagaaagagaatttttatcagattgagacaacggtggatggcaaagagattgttacggcccgtggttgggaggatttgtccaggctgatgcaggtttatgagcagctggatattcctgtggatgagtctgtgatcctgcagtacatccagaatcgtcggatcgccaaagattttgccaattatctggatttatataagaagtatcagacggactatgatgtggatgccgttgtacagggcaatgtgaagccgtcttccattgagcgtattcagaaagcatcctttgatgagaaactcagtgttattaatctgttgatcagcaagctgactgcggcatttacggaagtttttgacaaagatcagtatgtccgggatctctatgagattttgaaggagctgaagtttgtttttggtcgtgcaccgaaggatggttccagaacagcagcgattttgtcggaaaaggcagagcaggtggaggaagagctgaagctgaataaggagcgtgggctctatgatgcatccaaattgctcagtatgaaactgattttgaagacactggagcagtatcgtcagcagctggtcaaggataatcgtctggatccggatgaagcttttgcctttattaaggcatcttttgccaaggatacagaagagcgaaaacagctcattcagacagcggctgcttaccttgagaatgcttttgcttttatggaaagtgcttttggagagagccaggaaatggtcatctttatcacagagctgaatgccaataagtattgtgcacgttttatcagggacaatggttctgcaaaatatgatcgctacaataaatcgctgctctttgatgagaaacgtgagaatctcctccgtgatatcggggaagccagcgaatttgccgcttttcttgattagtgccgtggatatttgaagcataaaaatatgacagagaaaattttagagaatttcagcattgcccagatctgtgaatccgggcaatgctttcgtatggaggaaatacaggatggccgatatcaggtcattgccggggacagatatctggagttggagcagcagggaaatagggtccgctttgactgcactgaagtcgaatatcgggatttctggcggcattattttgatattgagacagattatggtgctgtgatggcgcagatcaacccgaatgatacctatctgacagcggctgctcagttggcatggggtgtaagaatcctgaatcaggatttgtgggagatgattgttacgttccttatttcccagcaaaataatatcgtcagaattcgccgctgtgttaagaatatctgtgagacctatggaacggcaaagacagcgtcgaatggtgtctgttattatgcttttccgacagcccaggcacttgccgggcttgaagaaggtgctttgatggcctgcaacctgggttatagaagtaaatatgtggtccgtgccgccaaagccgtatcttccggtgaagtggacctggcatggatcagtagtttgaattaccagaaagcaagggcggaacttttaaaactctttggcgttggagaaaaagtggcagactgtatctgcctttttgccctgcatcatttggatgcatttccggtggatacccatatccgtcaggtaatggaacaacattataaacggggattcccgaatcgtcgttacaaaggcattctgggcattatgcagcaatatatcttttattacgaactgcatggaagtgaaaaataatcaagataagggatttaaagagtgcctgtgttgaacagacgcatcttgaatccctttttgatttataattgctgaaaaggtattgacaagacgataaaagaggcttataatgtcaaacataaagaaaacatacaaatcctattaaataaataggaattataaaaggaaggagcatgcatatgcgaatgacgatatatcataaaggaagaatggagcgatgttgttgctgtatgagtgacgtcagacgagatgcatctttatagcagataaacagatagaggtcgcaacagacaatcagatgacaatattttttggaaataaagatttataaatttatttaaaatgaataaaagaattagatgaaatgaatggaggattatcatcatggcagatattaaacagagtgcattagagttaattggcaacacacctattttacagttaaatcgttacagtgagaaggcaggcatcaaggatgttacactgcttgcaaagcttgagtatctgaatccggctggttctgttaaggatcgtatcgcactggcaatgatcgaggatgctgagaaaaaaggtaaattgaaaccgggtgcgacaatcatcgagcctacatcaggcaacacaggcattggccttgcagctgttgcaactgccaaaggttacaaggcaatcctgacactgcctgatacaatgagtgttgaaagaagaaatcttctgaaagcatatggtgcagaattggttctgacagaaggtgccaagggtatgaaaggagctattgccaaggctgaagaactcgagaaagaaattgatggggcagtgatccttggtcagttcgataatcctgcaaaccctgcaattcacaaagcaacaacaggtcctgaaatctggaaacagacagacggcaaggtagatatctttatcgcaggtgttggtacaggcggtacaatcacaggtgttggtgaatacctgaaagaacagaatccaaacgtcaagattgtcgctgttgaacctgctacaagccctgtattatccacaggcaaatccggttcccataaaattcagggtatcggtgcaggtttcgtaccaaaggtactgaatacagatgtttatgatgagattcttcctattgagaatgaagatgcatttgcagaaggcaaaacatttgccgtatctgaaggtatccttgttggtatttcttcaggcgctgcattaaaggcagcacagattctggcagcaagaccagagaacaaaggcaagacaattgttgcattgcttcctgattcaggagacagatacctgtcaacaccattatttgccgaataatattgcttcacattgtttcataatacaactgcttttttataataatgctatttttctcgtacaagcaaaatgggcatcccagatcgggatgcctttttgtgtttgtgtaaaaatattagaaaaaatggattgttaggtaccttaataattattccaaaaaaaatggcattgatcatatggcaatataattttataaatttggatatttaggtacctaacaattgaatgggtatgcttatgagactaataattgagtatggacatttagatattcaatatttaaaaacgggtagtttggttttaataattaaacttgagtattttgagtatttaggtacctaacaatcagaaattcataaaatatatgagcgtggcacataattatataataagaataatttttataaaatgcagtcataagcagcgtgtaatctgcataaaataaatagaatgggtactttggatttaatagggacataaaaataattgaggtaccttattaatgaaaaaagcagtatataattcgaaaaaggagcgaacaaaaagaaggagaaaactggaggggaaaaccaggaaggaaattttagggagaaaatttcaggaagaaaatttcaagaagaaaattgcaaaggggataggaaacgtatggatatggatttttttgatgtaagttttgaagaatcactggatgagcaattggtgaatgctattttggatgtggggagagatattcgaagactttttgagggaaaggagagccagagtcgaattttaatgattttgaggcttcatggagctgtgactcagaagatgttaatacagatcttacatattcagccggggtcggccagcgagattctgaagaagatggaaaaggctggcttaattattagggtaccgaatgaaatgaatcgacgagcatcggatattgtgctgacacgacagggcagaagtgtatcggagaaactgattgagcaacgccgtggacggtatcgggagatgatggcgtgtttgtcggaagatgaaaaggtgagcctgttttcgatgcttgatcgaatgaaagaggattggcagcagcgtttcagagctgtgacggaaagtactatagcatcaggggattcatcgctgcaaaaagaaagaaataaaatctcggaaacatcgtcagatggaaaatgaggaataaaaaacacagtgctgtagattctcagctgccggatgaagcatggatttgagaaaagtaccgcactgtgtttttgttgttgagggatattgatgttttaattataaagttaacgggttacaggttcttttacgttgtggctgacttcggagcctgcctttttgtggaagagctctttaccgcagctgatgacgatgatgacaccgagaaccatcagcaggaaggcgatgatcagctggagaccttctacaaggaagacagctgtaccggcgccgtaagcgtggaacagtgcgataacacgttctacaagagcagttgatgttacagcaagcatgatgagaagcggtgcgatcagtgttctgaattcacggcctgtgacttttaaaaagacgcataatgtgatcagaacaagtgcacttaacagctggttggcgcttccgaacagcggccagatgttagcatagccgatctgagtcagaacataaccaaggaacagtgtcaggattgtggagaaatatttgttgcataaaagttttctccagccttcagcgtgttccatatcatcaacggtgaacagttcctggaatgacatacgtccgatacgtgcaactgagtcaagggttgtaaatgcaagggctgatacacacattgtcatgaagcactgggcaacgtaaacagggataccgaacatttcaaggaaaccggcaacgcctgatgagaagatggcgaatggcgtgcctgtggcagctgtaccatcagcagaggcagcggcacctgcaacacacagagccagaacggccagaagactttcaagtaccatagcgccgtagccgactttctgcatatccttttcgttggagattgtcttagaggatgtaccggaagataccaggctgtggaaaccggatacagcaccgcatgcaacagttacaaaaaggattgggaacatgtcaccggatttttcattgtgaaaaccggtaaacattggcaggttcattgtaggatgtgcagcaaacagaccaacaacagcggcaatgatcatgcctgcaaacataaaggttgtcatgtaatctctaggctgcatcagaagccagattggcagaacagcggccaggaagatgtaagcaaaaacgatgtaagaccaggttgttttggatgcaatcagcgggaagtttatgccgataacaaatgctgcaaacatacatacaagaccaagaacaacttccttccagcctttaaagtttgctttcttctggatgagaccaaatacagcggaaaatgcgataaacagaagagaaatgcttccggcagcaccattgacattggcggcgtcggataactgtgtcacacctgcttcagtgacagtataggcgttaaatgtaccatctaccatatccgcaaaggctgcgataacaatcagtgtaaagagccagcagaacagaagaaataacttcttaccggttttgccgatgtatttttcaatcagaagtcccatggacttaccgtcatttttgacactggcatataatgcaccaaagtctgtaacggcaccgaagaagataccgccgatcaggatccagagaagaacaggaacccaaccgaagacagcggcctgaatagcaccggtgacagggcctgcaccggcgatggatgagaactgatgggcaaagactgtcagaccatctgccggaacataatcctgtccgtcgtttttgcggacagcaggtgtctttgcattcggatcgatgccccatttgttggccagccagcggccatataaacaataaccagcaaccagacaaacggctgctatcagaacaataactaaagtattcataataatgtgcctcctcttaagtaaaatatagtgacgattcaaaaccgggtgtctgacacgtcggtgatgaatggtcgtgaataccagttggcaggtgattcggctttgaagttcaaaagatcaaattgcctgcatgcctgacaaaatcttttgaatttgaacgaataaatcataaaaaaagctccgtcttctgtgccctttcgggtttttcagaagacgaagcctatgactccgcgttaccacttctattatcggtttttcaatcgatcactctgccacgtccccgattctctctatcatcggtgaacatgctctcctgtaacggtgagaatccgtttcggactaatgaatctgtttcgtccgaaaagctcacaggggataattctcttaagtatctgctgactcacaccaaccgtcagctctctgaaagaataccggactaagaaaatcgtgtcctgatcgttgcttttgttgtttgttcttgaaacaattacagattatagacttttttgaaaaattgtcaataggaatttttgtactaaattgtatacagaatacccgcaataaacgacatatcaaataaacaaattgcgataattgttgggtgcatatgatggaaaaacgagttataatagacatgatgtagtataagaaaggaaatcatggcaggagattttttacagaaagaagaaagttagtcgcaacttaccaaaaaacttgacagaaacggcaaaaaaagagtataataaatagtggtcgtttctaactaatgtgggaacagaatgcaatgcgtgacaacaaagtgattagaaaaggagactgaatagaattgaagaaatgcacatggaagaagtatacagcaagtgttttagttgctgctatgcttgcagcccagccgatggcagtatatgcggacgaagcgtccacggcatcgcaggcagcatatagtgatacagaagcgaaagacataaatggtgtttatgaacgtgtatcagacaaggtagcaggtatgctggcgaatggtgaactgacttacagtgagacatccggttatttatataatgccagcggcagcaaggtagacccggagacaggtgctgagatccctgatacgacagagactgagactgagactgagacaaaggcaccggagaccgagacaaaagcgtcggataccgagacaaaggcaccggagactgagacaaaggcttcagagacatcagcttctgagactgagacagagtcccagacaggaacaggggaatcagagacagaatcccagacaggggcaacagatactgaaaccggtacaacagagacagaaacaacagagacaggatccgaaacagaatcagaatctcagtcggagacaacgacacctgggtcttcatcagataatgcttcggcatcgacagattcaaaagcaacggagtctcagacaactgcagagacaggcagcaatactcagcaggatgtttcctacaaggcatccggtgttttcaagaagattggtgatagagtacagtataatgtagatgttccgattaagggtctgccgtcatttattactcaggagatgattgtcggagcattaaagagccaggatgaatacggttatccggcttctgttacaattgcccagatcatacaggaatccggttatggtacatacggaccgggcggcaataaaggacagggactttcaggactggcctacggttactgtaacttattcggcattaaaggttcaggtactgcagggagtgtctcaatgcgtacatctgagatgacgaaggatggaaagatttattctacaacatctgcattccgtgtgtacaatacatacagtgaagccattgaggacagatgcaaggttcttcagaatggttacggtgatctgatcagcggtgtcaatgatgccaatacctttgcgatgcgtattggacagcgctgggcaacagatctgaattatggcaagagcttgatcaagctgatggaactgtatgatctgtatcgtctggatgatatgacactgaaggatttttcagcgatgatcggcagatttgcagatccttgtccgggtgcggttgtgacaagcaacttcggattcagagagtttgacaataaattccataaggggcttgatcttggtacaggcagcgagaatatcccgacgtatgcagcagaaagcggaaccgttatctttgcaggttattcggggtctgcaggtaatctgatcaccatcgaccatggtaatggcctggtgacgaaatacatgcatcattctgagatttatgtcaaagtcggcgatcatgttgagaagggacagcagattggtctgagcggtacaacaggccgttccacaggtaatcatctgcatttccaggtcgaggagaatggtgtggctgtcaatccattgttatatcttgagggcaacggaacaagcagtgaactgcagcgtatggacccgatgaaggatattgtcagcggtacaaaggttgttctggagaagaaggatatagagacttcaggggaggatgcacagaacgcagctgttgaagaaacagaagcggcagaatccattgcggaaacagacagtcagaagcagcagaaagagacagcggttgagacagcagagattgcggattcggccaagcaggttgttgacaaggctgtcaaaacggagaagaagacaatcaaataatacagcgcaaagcgcagtgatttagcaaataactaaaaataacaaaaccggtattcagccatcagctgaataccggttttgttatttaaaagctttgttagctacaattctaaaaactgaaatataaagatgcagcctgaacagaaggtcattaattgaggaagttctcaatgatcaccgattcagcttcttcttctgtcataccgaatgtacggagtttgatcagctgttcgtcgttaatacggccaatagccgcttcatggatgatctgtgcatcgatatggttggcattgatctcaggaatagagctgatggatgccttgtccataatgatggagtcacactggacatgtgcatgacaggcattgttgccgatggccttcggatggaagatctggttggatgtgcctttggcaacagaacgggaaataatacgggcagagctgccttcaccgttcaacttcacctccatgttggaaatagcatgctgagcgtcatgggtcatcagtttctctgtgacataaagtttggcatttggtccgagttcaacgaaggtttcacgcttggtagagtccacacctttgatctgggtggtctccagggtgaaaacagaattctcacccacataaatctttgttaccgggttgagaatcttgccgccggtgccgtttccttcagcgtagtggttctcgacatacttcacattggcatttttgccgacatggaaagtatgaataccatcgtgacgggtttcgctgcatccttcgccatggataccgcagccggcaacaatggtgacatccgcgccgtcttctacatagaaatcgttgtaaacaacatcaagaccgggttcggacataacaacaggaatatgcacctgttcattctgtgcttcactgctgattcggatatcgatgcccggaaggtcggttttcttcacaatagcaatatggcggctgtcaccatgacagacagccataccgtttaatcggagattgtaggcaccttcctgtttgaagccataggaatcaatcacctttaatacatcttctgttacctgattaagcttcacagtaatcgcctcctttctgctgaccataacagcaggcctcctgggaggatgtgtctaagagtgtcggaagaatctcttcggcaggcccgattcggtcaatcttgccgtcggagatgaccatgatcctgtccgccatacggataatacgttcctgatgggagataaggatcagactctctttcttctccttgtgaatctgttcaaacttcttgatcagcatagaaaagctccagaggtcaatgccggcttccggttcatcaaaaatgcaaagcgcatgctgtttggcaagaaccgttgcaatttcgatacgtttcatttcaccgccggaaagggtagcgtctgcttctctgtcaatatattcctgggcacagagaccgacactgctgagaaaaccgcagcattcgctctcgctgagggttcttcctgctgcaagattcagaaggcggcggacggtcatgcctttaaaacgcggcggctgctggaaagcgaatccgatgccagcctgggcgcgttcattgatggagaggtctgtaatgtcttctccgtttaaagtaattctgcctgaagtggcttcattgatacccatgagcagcttggcaagtgtggatttgccgccgccgtttgggcctgtgatgacaagcatttcgccatcggcaacattaaaactgatgtcggagaggatctctgcctgacggccatcatcccggacatcaaaggataaatgttctatttgtaacattttgtcacttccttatatagtattgataacaacatcaaatataaatataacatttatgttattttttcacaagtcttttagcacaaaaacgataaactatcaaaatgaatagtcataaaaaattatgggaaaatctggtggatttttgtccgaaaaggctgtataatgattggagtttatgggggaggtagaaaatggcacgagataatcaggatctgacaaaaggacctttagccaggaagattttatttttcagtgcaccacttattgtatcgaatcttttgcaggtgctttttaatgtggcggatattgccgttgtcgggcgttttgcgggggcatcagccctgggatcagttggatcgacaacgattcttgtgacgatgtttacgagttttctgatcggggtttcgggaggcattaatgttttgactgcattgtatcttggctccggagacaggaaaggagttcgggaaactgtacattcggctttcctgttcagtattctgacaggattgaccctgctgcttattggagcaatattttcaaaaggtattctggaactcttgaacacgaagccggaattgatcgatggggcggtgctgtatatacggatttattttctggggatgccggcgctggctgtatataattttggtaatgccgttttcagtgcggcgggggatacgaaacgaccgctgaagtatctttccatggcgggcgttgtgaatattattttgaatctcttttttgtgatcgtctgtaagatggatgtggccggtgtggctgtgtccagtattatttcacagtatttgtcggctgcgatgatcagcgttgcacttttcagaagcggggatatttatggactgcaccgatcggagctgcgtctgaacagaaacaagactgtgaatattatcagaatcggtattccggcaggacttcagaatgcgatcttccagattgcgaatctgtttgtacaggcgggcgtgaattcctttgatgccaccatggtggccggcaatgcggctgcggccaatgccgatgcgttggtgtatgatgtgatgacggccttctatacggcctgcggtagttttatgggacagaatttcggtgccggcaacaggaagcgtgtcaggaacagctatctcatcagcctggcatattcctttggtatcggtatgatcatgggattgggacttgttttatttggccatcaattcctctcattgttctcgacagatgcagatgtcattgaggcggggatgatccgattgtccattatgggtgtctgctatggattttctgcttttatggactgtaccatcatggcttccagagctttgggaaagagtatgataccgatggtgatcgttatcataggttcctgcgtattcagagttgtctggatttatacagtttttgcgtattttcataccatattatccctgtattccctttatatattttcatgggggatcacagccattgcagaaatcatttattttgtttacatttacaaaaaaagagtgtgctgaggctcactcttttttactgtgtttgattgtacacgatgcgacatatatcagctgtgaattcaaaattgctccaaatcggtgcctggtttttgaatgttaaccggcagagacaggacgtttaatctggctgaggctgtaggccagcacggaaccgatgacaagaacgccgcctgcaatggacataggtccgatggtttcgccgcagataatggccgccaataccgggttgagaatcggttcaatgcctgaggtcaatgcagctgttaccggggaaacggcatccagtccccgggacagacagatggtggccagaccggtctgtacagcgccaagaagtacaatcaccagccatatggatggtgtatggatggtttcgtgcacagcagtcggaaggccgatgatgaaggccagaatatagctgatgacaagggaagattcgaaatcgccgcccttcattttcttcatctgaaacataatggcataggacaggccggagataatggcaagaagattgccgagcatgccgccggaggtgatcttatcaaagaaaaagcatacaataccgattaatgcaatgatgcatgtaaggatagcccttttatccggccgtttatgatagaagatccagaggataagaatcagaaaaaccggatgtgtgaattgcaggatgatggcattggcggcggatgtcattttggtggcacagacaaatgtgatgctcatggaagctgagcagatgccgccgaaaataacggatgggttcagccgaaaaggatgatggatcagcttcatgtagagcagcagtgtgatcagggcgaagatgcttcgtacgccactgacagacagagactgccatggaacgattttgatcataaagccgccaaggctgaaaaaaatggcagaaagcaacacataaaatgtgccaactgccggattgttgacgcgtggattaagttgaatcataaagttacacctttgtagtaaaaataatgggtagatagaggatgccatagatatcccagaattgctatgcaggatatctatggcatctatgagttttatttgcagagttcttcagccagtgccgcaatctgtgcttcattctcagtgttgacagcggatttgatggtgactgttgtgtctgtaaatgtcagattcttgctgccttcaaacattttcagcatggttttggctgcggtaggtgcccatgagccgttctcaatgagaccgatcgttctgtttctgtagccgcgttctgtcaggtgttcgatgaatgtcttcatgaatgggaagatatcaccattgtaagtggttgtagccagaacgagcttgccgtagcggaaagcatcttcgacagcttcggccatgtcatcacgggcaaggtcagtaactgtgactttcgggcatccaagggcagtcagtttatctgcaaggagctcaacggctttcttagtattgccgtaaacagatgtgtaagcgatgacaacgccttcgctctcaacaccgtagctggaccatgtattgtagagatcaagataatagccaagattctctttgaggatcgggccatggagtgcacagatggtctggatatcaagaccggctgccttcttcaggagcgcctgagcctgaacaccatatttgccgacgataccgaaatagtaacggcgggcttcgcatgtccagtcttcttcgacatcaagggcaccgaacttgccgaaggcatctgctgagaaaagaaccttatccttgctgtcgtaggtcaccataacttccggccagtgaaccattggtgcaagaacaaatgtcagtgtgtgtgtaccaagagaaagcgtatcgccttccttgacaacaatctgtctctccgggtagtctgtgccaaagaattgcttcatcatcacaaaagccttggctgtagcgacaactttggcatccttgtaaagatccagaaagttggcaatgttggcagagtggtcaggttccatatgctgaacaatcagataagatggctttctgtcaccgatgacgtctgaaatattcttcagccattcatctgtaaaattgccgtctacagtatccatgactgcaatctgctcgtccatgatcacatatgaattgtaggccatgccgttttctacaacatactgtccttcaaataaatcaatgttgtggtcgttaacaccaacataacggatatcatctgtaataaacatagtctcactccttaaaaaatgtatttattattgttcttaatgtagctgtaatcgatgctattatagcatttgaaagtaggaatgtctactgtttttgaaacactcgatgtttttaacaaaagttagcaagaattctccttcctctacatgtgggagatgaattgcagaaaaaaagaaaatagaacgcttgttctgcagtgcgaagtgtggtatactataatcagtcgaaaggatagaaaggactgattatatggacaaagtggatcatgatgttgatcatgtgcatgttatgtttcgagcacagccaaaatcagaactcagtaaatttatcaatgcgtataaaagtgcaagcagtcgtttgttaaaaaaggaatatccatgcggtgaaagtcgcacgtccggtgtggagtgggggaaaatccggcgataacttcaaaggattacctatcactataagccgaaaccctcttgtactgtgcccttgtggcctacatcgtctttgaggggccggaggaagaacgcaacatgaatacgctggtggaaatgataaacagcatggaagtccgggaggatgacgaaaccttcaaaaacgcggtggactatatgtttgacgggctggaacgccgcagcccccagcacttcgccgtgaggcagtataagaaatacaagctcgccagcggcaagacagccaaaagcattttgatttcctgcggtgcaaggctggctccttttgatattccccaactccgggagatcatgtcctatgacgagctggagcttgataagctgggggacgaaaaatcggcgctgttcttccttatcagcgacacggacaccacctacaactttttggttgccctcgctttttcgcagatgttcaaccttctgtgtgaacgggctgataacacctatggcgggcgtctgccctaccatgtgcgggtgctatgggacgaggctgccaacaccggacaggtgccggggctggaaaaaatcgtggctgtcatccgctcccgtgagatcagcctgacgcttttttatcaggcaatgagccagtgcaaggcattgtacaaagaccattccgaaaccatcatgggaaacatggacagtatcgtgttcctcggaggccgggaggcttccaccctaaaggatatttcggaaaactggctgggcaaggccaccatttccatgcagaccgagggtcgcagccgtggacagtctgaaagttacagccagaatatgcagcggcttggccgggagctgatgaccaccagcgagatcaccaccatgcccggagataaatgtatcttgcagcttcgggggctcccgcctttcctgtccccgaagtatgacttgaaaaagcacccgaattacaagtacacagccgaatttgataaaaagaaaaacgccttccgcttggaaagcctgttccgccaccggccattgagactaaagccggaggacgaatacacggtgtacgaagtggacggctccgacacggacgaagaagctgacctgttgaatttcgatgatctggacagcgacgagtttgtgtaacttcgggccatgatgacccgaagcgccgccgatgtgggcggctttttttgtacccaaaaccatcaaacaaacaaaatggaggaacgtatatggaatttttcaatcaggcaatcgacattcttaaaattctggtcatggctcttggcgctggtctggcggtatggggcgtcatcaaccttctggaaggttacgggtcggataaccctgcggcaaagtcgcagggcattaagcagttcatggctaattaaagggaacaaaaagaaagggaatgcacaatccagacggtatcagcggcaggctacaagaataaattgtgatttcacaagattggtgttataataagagaaaagttcctgccggggcaaccgccccggtggtatggatagaaaggcaggaaaacaatatgcacatcagctataaaccactctggcacacactgttagagcgtgatatgagaaaagaggatttaaggcttgctgctggtatgacaacaaatatgattgccaacatgagcaaagagggaaagcacatcagcatggatacattagcccgtatctgtgaaactctgaattgtgagattactgatgtgattgagttagtaccagacgagcctgcttccacaggaggtaaggaacatgagcgaattgaaaccaagaataacggaaaacggaattgattatatccttgtcggagattactacattccaggcttgaaactgccggaggaacaccgccctatcggaaagtacggacgaatgcaccgggaatatttaagagaagtccacccagccagattgaatacattgatactgaccggagaattgttgacatatcttgcagacctgaatgaacaggcacaaaaacggttagacactatcatggagcagatgaaagctaccgagggcgtgacagaggaattgaagtgtacccgacaaatggaatgggtgcagcgttgcaataacattcacaacagggcagaagaaattgttttgtatgagatgatttattcataacgggagcaattaaatcggaggtatataagatgattgaaattgtatttggtgaaagtgcctgtggaagtttgaaaattgcccaaacttacggcaagggaaagtatagaggaagtgctatttcaatatttatgaggcacgaagacgggagtgttccatcttcagatgaaatgaaaaaggcacagcttcaagcacaggaacaagaacgcattgcttgggagaatgctattccattgggaggcaagagcagtgatgtttattgttttgatatggttcttagtgtgggagatatttctgataatggaattggcgaacagcggaaaaatattttcaagaaaatgctgtctgtctgctttgtagaggatttagattatcaggttgaagaaaaaatacagaaaattaaaactacattgacctcagtgattgaacgatatgtagctggggaagaaattcgcatttggtatagctataatccagatgagctttgtggtatgtattggcttatgaaacaacttcaaccattaaactgccagacaacaatttatttggttaagttacctacatgggaatatggaaaagaaaatactatgacatccaaaatagcatggggcgaggtctctcctggcgaatggggaaactatataactctacaagagaaagctaatcctgtatttctttcagcttgtactatgaaatggaatcaacttcaaaatgaaaatgcacctttgcgtgcaatgttaaatggtaaattgcaaagcgtttcagaagatatatatgatagtttcattcttcgtgaaattgcggaacagccagagcaattcaaaatggctattgtcataggtaatgttttaggaaaatatcaacttggaattagtgatgtatggatttccaatcgcattgataaaatgcttgaagatggtgtgttggaaattatacaggacgcaccaaagggagaaacaaattatcgccgaatattaagaaaacgaatgaaataataaccacagcacaaaccgctgctacatggaatccaacaaaccatgcaacagcggttttcctttaccgttttttcctctggctgataggcgttcccattttctttgattttttgagaatacgaatgaaccagcgaaattcttcttctgacaggtttttatagttgataccaagctgcttgcagtaaaggataaccagtttttcatctcgactgcccttgaaattttcgaccgcttccagattttctttcagttcatcggcaacggtagtttggggcgcactctcgctgtcctttttgtggaattcccgaatatcccggataatcaggttgaggtcatccagaaccatgtgactgaaatactcatcatcactgatatgtgcggcttgcagcaccttcaaatgcgggtcatcttcgccggggcgataccgttcaataatttcatgccggacggtatcaacaagggagttgagattttggatttgcatggtggcaatcccgtccacataaatctcaatgtccgcaagaaacttgataaagtccttatgggtggcaagttcgcagagcagacggttgttaatccgaccgcttttcagcagtgccaccatctcatcgttcaaatgcagctccgtcagtggcgtgttgatctgctccctgttctctgtccggcacagcagataatcgacggaaaccccatagaagtctgccagcgtgataaggttgccatgattgatttccttataatcctctttttcataactgccaagggctgatttagaaatgcccgtcagctttgatagttcttccagatttaagcctttgtctttgcggagttcccaaaggcgttcctgtatgcttgttgcaactttcatgggcgcacgctcctttccggtggttttatttctgccgtttaactagattatatcacactttccgcaatcgtggaaatttctgattttccccctgattcctactttgtggatatacggcacagggcacaaaaatgttctatgatacaggtagttcatcgatggattattccaatcgaatgaccagcctgtgtgggatatgcttccccggcgatgtagcgccatgacttttggcagggatatggaggaaccctgaccgaaacgagcgtaccaaagggagcgatacgccgctgtgagattcaggggaggaacgacaccggggagaactggcgaactgacatcgaaatgataccgaaacacgacaatctgatagggggatagtctaccctatcgctgatacttcgggagattttaagcggctctatgaccgtaattttgccgaaaatcgccccgaaaccatacacaaaaacgggaggaagcgcaatatgccgagaatgagcaaaaagaggaagcatgagctttccttttacctcaatgaccgggggcgtgtcacttacaacgaattatgccggaaatgccagcatgggtgcaggcagagcttccgggcggttgtggttgactgcccccgttatttatccaaacgagcaaagaaaaaggaggaacacaccgaatgaattttgaatttatgacgatagacacaccattgccgccgtgtatgccatttcccatagcgttgacaggatttccagtcagcagcaccgcaaaggtcatgtactgccggatgctggacgctatgctatccaaagggcaggaggacgaaaacggaatcctgtttgtctgcttccctgtcacagccattgccgcagtcctgtcccgcagccccatgacggtcaagcgttctctgaatgaactggaaaccgccggacttatcatgcgggtgcgtcagggcgttggagagccaaacaggatttatgtgctgataccgggaaaggaggacgctgcccttgcctgatacctcaaagctggaaaagctcaaccgggagttggagaaaagcgaaaagaaactgcggaaagccatcaatgatgaaaaggcattgcagcaccagttaaagcagcttacccgaaaggaacggacgcaccggctctgtacccgtggcggtatgctggaaagttttctgcaagagccggaacgcctgacagatgatgatgtcatgctgttgttgaaactcatttttcacaggcaggacacgcaggaactattgaaaaaactgctggaacgggagaaggcggaaaccccttagtttactaagggcgcaattatacaccacccagaggttggtgcattgcgttctccgaaggctcctcgccggagggctgtgattttccgcagtcatggtctgctccaaatcaaacaggggacgctacgcttcccctgcgctggctgccgccagctacccttttgtggacttgccatctggggacaccttgcgctgcaagctgttcccagccgacaagtttcataaaatatgctatcttttcgatagccaatgaagtataatgaagatgacaacaaatcggtatttgaaaggatgatgatatgatggataaattaaaaaagaacatggttttctacctactgttgctgatagatttttatatcgttccttggtttataaaagacacaggaagtgcaatgattgttatgttagtaattattcctctaatatgtttaataacctctgttttttataggattaggaatggttttaacttctggtatattttgattgtagcaataatgtttgcgccatctatatttatattttataactcaagtgcatgggtttatgtagttggatatgctgttattgcattattgggaaatttaatagcattgccattaggaaaaagataacttccagtttgtcagcttcacatcgggtcaacttgccccgaacttttacaattaaatacccgccgcccacatagcggaacaccgagcaggaaatctgaaaaaggtctcctgctttttttctgcccaaaatgaggtggtaaaacgccaccccgtccaccaattagcgaaaggagggacacgaaatgccctgtccacacaacgaaatcacgattgttcagcgcagccagcggcagtctgcggttgccgccgctgcttaccagagtggcgaaaagctgttctgtgaatacgaccagcaagtgaagcactacccggaaaagcgtggtatcgtccacaatgagattctgctcccagcaaatgccccgccggagtatgcagaccgtaataccttatggaacgccgccgaagcggtggagaagcaatggaactcccagcttgcaaggaggtgggtgcttaccatcccaagagagataccacccgaccagtatgctgtccttgtccgggagttttgtgagcagcagtttgtttccaaaggcatgattgctgattttgcaatccatgccccccatccgccgggacacaatccccacgcccatgttctgctgactatgagggcaatggacgaacatgggaaatggcttcccaagagccgtaaggtttatgaccttgacgaaaatggggaacgaataaaacttccgtccggcagatggaaaagtcacaaggaggatacggtggactggaacgaccagaagtattgtgaaatctggcggcatgagtgggaagtcatccagaaccgctatctggaagccaatgaccgcccggagcgtgtggacttgcgttcctatgccagacaggggcttgatattgtccctactgtccatgagggggctgctgtccggcagatggaaaagcgagggattcagaccaacatcggaaatctgaaccgggaaatcaaagccgccaacagcctgatgaagtctatccggcagcttattaaaaatctcaaaggctggattatcgagcttagtgaaaaacgaaaagaactgcttgcggaaaaagctgcggaggaagcggtatttcttcccaatctgttgatgaagtacatggaggtacgaaaggcagaacggagcgactggacacgggcgggacaaaaccgtggaacttccaaagacttaaaggcagtcagcgaagccctgtcctatcttcagagaaagggactttccaccgtggaggatttggaaaactttatagaaacgtccgggaaatctgccgccgactaccgaaagcagatgaagccaaaggaaacccgcagcaacgtgattgacgctatccttgccgcccggacggactgtaaggaatgtaagcccgtttatgagaaataccagaagatatttttcaagaaaactaaggaaaaattcaagctggaacacccggaggttgcccggtttgagaaagccagtgcctaccttgccaagcacccggatgataaggacagcacgaaaaaggagcttttgcaggaacaggcgaagcttgtgggcgaaatcgcagacttgaaagtaccgttgaccgaggtgcaggaagatttgaagaagctgcgggacatccgctactgggtacggaaagccacacccggcacagaggaaagcaaagagccgcccaagaagcagcccctcaaagaagtcttgcaggataaggctgacgagaagaaagcacagaaaaacgccccggcgcagacgaaacacaaacaacaggatatggaactttaacaggcacttgccattttcagattgagaatgataagtgccttttcttttttacaaggaggaattgatttgaatgtatttgaagctgtgaagcagtccgttacgacaagacaggctgcggagcattacggaatccgggtaaacagaaacgggatggcttgctgcccgttccacaacgataagacccccagcatgaagctggacaagcgtttccactgcttcggatgtggtgcagatggggatgtgattgattttgtagctgccctgtacgggctggggaaaaaggaagccgccgcacagttggcgagtgacttcgggcttgcctatgaggactggaagccaccgggcagggcaaggaagcccaagccccggcagaaatccccggaagaacagttccgggaagcaaaggcacattgcttccgtgtccttgccgattatctacacctcttacgggtatggaaaaccgactatgccccgcactccccggaggaagcgtttcatccccggttcgtggaagccttgcagaagcaagcccatgtggaatatctgctggatgtgctgctgttcggggagacagaggaaaaagcggttttgattatggactacggaaaggatgtgatacagcttgaacagcgaatggcagagcttgcagccgcagacgcagcaagaactaaaaaacaccatgaacgccatgcagccgccccagagcgttgaggaagtaaaggcaactctggaaaccaccgagaaaggcggcgtccgccagagcatacggaactgcctgaccgtattccagcgtgaccctgtgcttgccggggcaatcgcctacaacatcctgaccgaccgcaaggacatcataaagcccatcggttttcacagagaaagcacagccctgaccgatacggacatgaagtatctgcttctctatctggaggaaacctacgggcttaccagtgagaaaaagattgaaaccgccatcgggattgtggcgaatgagaataagtaccaccccatccgggattttctgaacagccttgcatgggacgggactgagcgcatccgcttctgtctgcggcactttctgggagctgatgtggacgattacacctatgaagccttgaagctgttcatgctgggggcgattacaagggcatttaagcccggaagcaagtttgaaatcatgctgtgtctggtaggcggtcagggggctggcaaatccaccttcttccggctgctggcagtccgggacgagtggttttccgatgatttgcggaagctggacgatgataacgtgtaccgcaagctgcaaggtcactggataattgaaatgtcggaaatgatggcaaccgccaatgccaagagcattgaggaaatcaagtcctttctaagccgccagaaagaggtttacaaaattccctatgaaactcacccggcagaccgcccccgtcaatgcgtgttcggcggcacttccaacgcccttgactttctcccccttgaccgttccggcaaccgccgatttatcccggtcatggtgtacccggagcaagccgaggttcacattttggaggacgaagccgcttccagagcctatatcagccagatgtgggcggaagcaatggagatttaccgaagcggcatgttcaagctgtcattcagcccagccatgcagcggtatctcaaagaacaccagcgggattttatgccggaggacaccaaagccgggatgatacaggcttaccttgataagtacaccggggaaacggtctgctccaagcagctctacaaggaagccttaaaccacacctttgatgagccgaagcaatgggaaatccgggaaatcaacgagataatgaaccagtgcattaccgggtggaactacttttccaatccgaggatgtttgcggaatacggcagacaaaagggctgggagcgtgaaatcccggcaacggacaccgacaacccgcccgaaaaatctatggacggttttgtggaggtcacagagcagatggagcttccattctgaaaatgacagcccgttgccgacttcgttgctatcccgttgccgagccggttgccggggaaaatcccttatttccgggctttttccctctctgacaaccaaaacaacagaaaaataaaagaaaagtataaatagtaatcaacgccagattgagattgtttgcaaggtcttttgaagcccgttgccggacttcgttgccgaccgttctctgtctggctattttcatgtatggaggataactgcctatggcgaaaaataagaccaagattgaagtgacaaccgtatttgacggggaactggacgccaccgatgtgttcgtcagcctgatttcccagaaatacggcaaaacaaatacaaaagaatatcttgctaaaaagaaagatttgaagtataatgaagatgaggttcaacagagccagataccgtctggattgtgtgggtaaatggctatgatgaacgaaatggaatacagaacaatcggttcagcacttgccgggggctatcgtgcggcggtctattgcaggctgtcaaaggacgatgacctgcaaggcgaaagtgccagtatcgcaaaccagcgtgatatgctggaaaaatactgcgaaaagcagggatgggaggttgtggcagtctatcaggacgatggcttcacaggtcttaatatggagcgtcctgatttacagagaatgttgagagccattgagcgcaggcaaatcaaccttgtcatcacgaaagacctcagccgactggggcgtaactatctgcaaaccgggcatttgattgaggactttttcccaagaaacggtgtccgctatatcgccatgaatgacggtatcgacaccctgcgggataacaacgatattgccccgttcaagaatatcctgaacgagatgtacagcaaggatatttccaagaaagtccattcctcttatcttctgaaagcgcagaaaggacagtttaccgggtgtcttgccccctttgggtatcggaaagacccagaggacagaaaccatctgctcattgacgaggaaaccgccccgattgtgcggctgattttcggatatgctctgaacggtcatggtccgaactatatccgcagacggctggaggaagaaaaaatcccctgccccacatggtggaaccgggaacgggggcttcgcaatacccgcaccaaatgggaaaagaaagacccagaaaacggacggtatatgtgggacttctccgttatcaaagacctcttgatgaatcccgtctacaccggggcaattgcttcccagaaaaaagactaccgtttcaaaatcggcacgattggagaaaagaagccggaggactggattgtggtggagggacagcatgaaccgctgattgaccgcatgagctttgacattgtgcagaacaagctgaaatcccgccagcgtccggggcagaccaatgaaatcagcctgtttgccggactgataaaatgcggcgagtgtgggaagtcgctgacggtacgctacacaaacgcaaaacatccccagcagatttattcctgcaagacctacaatgcctttggaaagaaccactgcacccagcaccggattgactatgacaccctttacagccatgtgctgcggaaaatccgggaatgtgccagagctgccctgatggacgggaaagcggttgccgaccgcctgactaatacctgtgaagccgagcagcgggaacagcgggaagcaatggaacgctcccttacaagggacgaggaacggattgaggttctggataaaatggtcatgcggctttatgaggatatgattgcagggcgtatcagtgagcagaatttcaacaccatgctggaaaagacacagaccgagcaagcggagcttaaagcaaaagtgtccgagggcagaaagcggctgtccgatgaagtccagcttgccaatgacgcaaaacaatgggtggaagccattcaggaatacgccaatatcacagagctggacgcagccaccctcaaccgcttaatcaaagaaatcgtcgtgcatgagcgcattgacgaagataaaacaagacacatttctatcgaaattcattttaatctcaaacccatcccagaggtggaacaggtcactgcctgacctgtcccgccgggacggttctcttaaaaacaccatatagattttttgtacgccgccgcccgccatcgagcagagttttacacctaattggggataaaacagctcatggcgggcggcggtgtcgttctgatcggccttcagcttatccctctgctgtccggcctgttcagctaagtgtcacccgttgtcccttttccagaaaaggagctgatgtatggactttatcatcgacgcaatcgttgaatggctgaaaggtctgctcgtcgatggtatcatgggaaatctggatggccttttcgataacgtcaatcagagcgttggcgagatcgccacacaggtaggcacgaccccggcggactggaacgccggggtcttttccatgatacgacagatctccgaaactgccattctgccaatcgccggggtcatcctcacttttgttatgacctatgaactgatacagatgctcatagaacgcaacaacctccatgaagttgacacatggatgttttttaaatgggtgttcaaaacctttgtggctgtgatgatcctgacgaataccttcaatatcgtgctggcggtctttgatgtgagccagcatgtgatacagcagtcagcgggcattatccagaacgggacagagatcacgccggatgtgctggacagtctgcggacagagcttgaggcgatggagttaggccctctgttcggactctggctccagtccttcctgatccagcttaccatgattgccttaaacatcgtgattttcgtcatcgtatatggccgtatgattgaaatttatttactcacaagtttagcgcctatcccgtttgccacagtccccaacagggaaaccggacacatggggcagaactatttccgctccctctttgcggtgggctttcaaggtctattgatcttagtctgtgtcgccatctatgcggtgctgatccagagtatcgccaccgacggcgaccccatcggggcgatctggggctgtgtgggatatacggtgctgctgtgttttaccttattcaaaacaggcagtcttgcaaaatccatcttcggctgccattaagagacttcgggccatgatgacccgaagcggaaaggagaaatccatgcaggaaaaaactgcgggcggaacaccagccgcccctataaagctggatgtaagcgtgcggatcatcgaacctgtgaaaaacctcatgggctttgccagcgtgaaattcaatgactgctttgtggtggaaaatctgaaaatcgtacagggcagcaagggcctctttcttgggatgcccagccagccggacggcaaaggcggctaccgggatatggcctaccctgtcacaaaggagttccgggaacagctcaacaccgctgttctgcaagcctatgaggcaaagctggaacagatggcggagcgcggctctgtggggcgtgcgtccatcagcgaccagctcaaagccgggaaagcggctgctgaacaggcaaaggcagagcggcctccgaaggaaaagcccagccgcagtgcagagcgttgacctcgggccatgctggcacgaagcagaaaggaggcgggaaccatgccacgcaaacggacgggctatgacgcggcctgctattacgacggaaaactgctgggccgctgtaccaaagcggacagtgacgcctataccctgttgatgaacgcctgcggcggggaggccgcccgtgtcctgcgggaatacgcctacttttccccggaacttcgcgccatcttggaaaaggcggcgctcatgcaggcggaccggagccggacgggcggaatgttccatgggccgaaaagctccccgtggggcgaggtgcagaattgtgaaaccctctgtccgggggtgtttctggtatctaccgccagccacggcggaacgatggtggcaaatgaggtagccgccgtcctctccccagcagcgaaaaagtgcggcttcaaggacaagggctatatctgctatgaggaggacgcacaggaaagcgtagtgctccgggagctgctggacaaaaagctgtggaaaatccctgaccgcattaaggacaaaggacagtttgaagaaaaactcaatcagtccatccggcagtatcaccccgaatactggcgggcaaggcagagcggacgagaggccgccgaagctgcccgcagcacagccccggccaaagaggccgcaagataacctcgggtcatgctggcccgaagcaataaaggaggtgtacccaaatggcctatgtgccagtaccaaaagacctttccaaaatcaagacaaagctggccttcaatctgacgaagcgccagcttgtttgtttttccagcgcggcggcggtgggcctcccggcttacctgttttcccgtggcagtatcgggaacagcgccgccatgttcctgatgatcggcctcatgctcccgttcttctttctggctatgtatgagcgggacggcctgccgctggaaaaagtgctgaaaaatatcatccgcacccggttcctctatccccgtgtgcggccttacaaaaccgaaaacttctatgcgctgcttagcgccagaaaggaggcgcagccgattgcgaaacagcagaagggccggaaagcccgcaggcagaaagcctgaaaagcagggccttaccggcctgttcacgaaaggaaagaacattcccaccaccgcccagcagaccctcccttaccgggaaatgtaccgggacggggtgtgccgggtagcggaccgctattacaccaaaaccattgaatacgaggacatcaactaccagctcgcacagtccgaggatcaggcggccatctttgacgggtggagcgcctgcctcaactactttgacagcagccttccgttccagctttccttcctcaaccaccggagccgcccgggcagccggtacagcgtgaacatccccatgcaggacgatgattacaacagcgtccggtgtgagtatgtggaaatgctggaaaaccagatcgccaaaagcaacaacggcattgtccgcacaaagctcctgaccttcggcgtgaacgtggacgacctttccaccgccagggcaaggctggaacgtgtagaggcggacatttgcgggaacttcaaaaagctgggcgtcaagtgccgttccctttcggggctggaacggctggaacttcttcacgggcaactccaccccggcagcggctcccccttccggttttcatgggatatgatccccaaaaccgggctttccaccaaagactttatcgccccggacagtttcgattttcgtttcagccgtctgttccgggtggggacgacctggggcgctgcctcctacttgcagattttggcctcggagctctcggacaagctgctggcggagcttttggaaatggacgcggaaatgaccatcactctccatatccaaaccgtcgatcaggccgccgccgtaaaatccatcaaggccaaagtctccgacattgacaagatgaaggtggaggaacaaaagaaggcagcccggtcagggtacgacatggacatacttccgcccgaccttgtaacgtacagcaacgacgcaaagacccttctggaagatttacagagccggaatgaaagaatgttcctgctgaccttccttgtggtaaacatggccccgacccgccgggagctggacaatgacctgttcacggtgtcgggtatcgtccagaaatacaactgcaccttgaagcggctggacttccagcaggaggacggttttctttccagccttccgctgggtcataacggcattgagatcaagcgtggcatgacgaccagctccacggccattttcgttccctttatgacgcaggagctccgcatggatggcgaagccgtctattacgggctcaacgcactttcccataacgtcatcatggcaaaccggaaaaagctcaaaaaccccaacggcctgttcctcggcgtgccgggctccggcaaatcctttgccgcaaagcgggagcttgtgaacgtgttccttgccacccgtgaccggatcattgtggttgatccgatgggcgaatattcgccccttatcaagcggctgggcggtcaggtcatcgagatcgccccggacagcccccaccacatcaatccgatggacattgatttgagctttgacgaggaaaacccgatggcgctgaaagccgactttattctgtcgctgatggagctgatcgttggcggcaaggacggcttgcagccggtggagcgtaccgtcattgaccgctgtgtacgccagatgtaccgggaacacttgcaggacgcggaaacaagcaaaatgccgaccctccaaaccctgtatgacctgctctgttcccagccggagggcgaggcggtacggctggcaactgcccttgaaatttatgtgtcgggttctcttaacgtgttcaaccatgaaaccaatgtggacttgaaccgccgtttggtatgccttgacttaaaaaagctgggggccgggcttcggacgattgccatgctcattatgcaggacttggtaaactcgcaggtgtccatgaatttcctgcgtggtatcgctacatggtgctacttcgacgagttccatgtgctgctccgtgaccgtctgacggcaagctattgtgtggcgatctggaaaatgctgcgaaaaaaagggtgcgttccgagtgctttaacgcagaacgtaaaggtgcgcccagatagggcgctgtgcaaagcagtctaaggtactgccgcacacggcagtgtgcgaaacaatctgccttaccgactaaggagaaatcctttacgggaacagcgcatggcagaaaaaggaatagtcaccaaaggacataggtgcgactgtttcctaatgttaagaagatatgaggataagattgggtttatcgaatgtaaggttccagttcctgttttttgcaggtgtgggaaaagtcctgaaacccatgtcataacgctgtcacgtcatctttcacggcgggataactgccaacacgttatgaaacaggcgtgagaacacgtcacaacgaaccgaaagcatatccgacaatcttcactaacctatgcacagtgctaactggggattgcctaagtccggctcatttgccggatatggtaacggaggctccatagtagtccgagaggggtaatgacccttacatggcgaagggagccagttagtaacatctaaaatgtaagaatgaaagggaggagaaacctcaatgaaaccaacatctgaaattttagagcgtattgaaaagtgttccagcgaacacaaagacggcgtattcacaagactttacagatacttgcttcgtgaagatatttactacgccgcctatcagaaactttatgcaaacaaaggtgcaacaacacagggtatcgacgacgataccgcagacggtttcagtgacttctatataaaagagttaatccagtcactaaaggacggaacctacaaggctaatcctgtaaggcgtgagtatattccaaagaaaaatggaaaactccgtccgctgggtatcccgtctttccgtgacaagctcctgcaagaagttgtcagaatgattttggaagctatctatgaacctgtctttgacagtcattcccacggtttcagaccgggcaaaagctgtcatactgcactgcgtcagatttcttctgacttcacaggcgtggtctggtttatcgagggcgatatacaaggttgttttgataacatcaatcacgaaaaattgattgagattttgagcaggaaaatcaaggacagtcgttttctgaacatcattcgccagtttttgaaagctgggtatatcgagaattggaagtacaacgccacttacagcggttctccgcagggtggtatctgttccccgatacttgcaaatatctatctgaatgagctggacaagaagtttcgggaaatcgcagaactctttgataagccgaggtctgcatatcagacactggaatatcatgcggcaagcaaagaattaaaaagactgtcttactggattgaccatacctctgatgaagcggcaagacaagaactgattgaccagcatagggcgcagaagaaagctatgagaaatctgccctgcaaacctgccgacaacaagaagtttacttttgtccgttatgcggacgattggctggcaggcgtgtgtggcacaaaaacggaatgtgaggaattgaaagccgaaatcgctgaatttctaagcacagagctgaaattaactctgagcgaggaaaagacgctgataacgcacagctccgaaaaagtccgcttcattggctatgatatttgtgtccgcagaaatcaggaagtcaaaggtcacagaatgaaaaacggaacgtggagaaaatcccgtaccctgcacatgaaagttgccttgtctattccccatacggaaaagattgaaaaattcatgtttgcaaagaaagtcattcgccaaaaggaaaacggggagtttcagccgatacaccgagccggacttctcaaccttgcggattatgaaattgtggaacagtacaatgccgaagcaagagggttatgcaactattacaatctggcttgtgattatcacacgttggactacttctgctatctcatggagtacagttgcttaaaaacgattgctaataagcataaaaccagtatccgcaaaatcattcgccagtataaagacgggaaaacatggtctgttccttatgaaaccaaaacagggacaaagcgtgtgcgccccgttaaaatcgctgactgtaagcgtggcgaagcgagtgacatcatctatcagagaaagaaatttagctggaaaaccactatcagacagcggctcaatgccagagtttgtgaattatgtgggtgtaaagaagccgatttgtatgaggttcacgttatacggaacttaaacgaattgggtaattctgattgggaaaccgtgatgaaaaagaagcggagaaaaacgcttgtcgtttgcagcaagtgccatgaaagaatacacagacactaatcaatacgtcaattactaatggggagccggatactttgagaggagtaagtccggttccgagggagggtgtaggaaacctaccgccagcggcggcaaggcgcctttaccctaccctacgattttctggcaagcccagagattgagaacatctttgaaaactcggacttccttgtgctgctctcgcaggcacagggggaccggcagattttagctaaacagcttgggatcagcccccaccagctttcctatgtgacccataccaattccggcgaagggttgctgttcttcgggaataccaccatcccgtttgttgaccgcttcccgcagaataccgagctgtacgccattatgaccacccgcccggaggacaaaaaacaggaaatgaaccgggcataacacacttcgggccatgttggcccgaggtttggaaaggagggatacgtcatcggaaagaaaccggacaaacggaattttcagaggccggggccgacggaggataccgggggcaatcgccccggaccggctgaacgggaagggccttcccccgcaccgtcccgacgcctgcggtttgaggacgaggataccggacaggacagcccttcgggccacgatggcccgaagtccaaaagcggtaagtttcaagaggacagccggaaaagccgtccctctgaccgcatgaggcaggaagatgaagcgggcgggccgcaggataccggcaaggcacaggagccggatggctccgccgagaaggccgggagcaaaaaggacaagtaccagaaagcacaggcaaaagcggaacacgccggggaaaagctgggaaaggcccgggagaaactggacaagaccgaggtaaaacgggcagcgaagccgccaccggggcttgcaaaaaaggcagtccggggagcccgtacagaagcatggttctatgtccacaacaagatacacgaagtcgagcatgaaaatgtgggcgtggaaggagcccataaatccgagctggccgcagaggcagggacccggaaactggcccggtatgccaaacgccgctggcgggaacacccggcccggaaggtggcaaagtgggaacggaaggacataaaagcccgggccaatgtggattttcagaagatggcctccgagcacccggagcttgccagcaatccgctttcccgtgtgcagcagaaatggaaactgaaacgccggtattccaaagaggcaaaggcggctgcaaaacagggcgcaaaggccgcaaagaaaaccgctgccgcttcgggaactgcgacccgtcgggcggcgcagtttgtgacccgtcatcccgtggcggtgctggtcctgctcctgctgttgctgctctgttttcttgtgtcggcggtaagctccatctttcccacgcttggcagcggccttgccaatgcgttatccggcacctcctatgcctcggaggatacggacctgctgggcgtggacgaggactacacggcactggaaaacgagctggcgcagacggtagcgaacatcgaaagcacccatcccggctatgacgagtaccgctattccgtggacgagatcggccataacccctatgagctggcgtcctatctctcggcaaaataccatgtgtatttccgggaacaggtgcaggacgaactgcgggagattttcgaggcacagtatgagcttaccttgacggaggaagtcgagatacgctaccgcacagaaaccagcaccgacccggagaccggggaaaccaccaccgaggaagtcccctataagtattacattctcaatgtgaccctcacaaacaaaacgctgcctgccgtgatcctgccgaggcttaacgaacagcagcgggaaatctacaccgttatgcagcagctcaagggcaacaaaccctatctgtgggaagggatttacaacggcggcgaagataccggccccagctatgagatacccggcgaggcgctggatgacccggcttttgcggcgctcatggaagaagccacaaagtacatcggctggccctatgtgtggggcggctccagcccgtccacctcctttgactgttcgggctttgtctgctgggtgtacacggccagcggcgtccacaacctgccccgtaccacggcgcagggcatttataaccagtgcgctatcatttccccctccgaggcaaagcccggcgacattatctttttcacgggaacctatgacagccccggccctgtgtcccatgtggggatttatgtgggcgacgggatgatgcttcattgtggttcgcccatccaatacgcaaacatcaattcaagctactggcagacacatttctatgccttcgggcgtttgtgagccagaggaaaggagtccttgcatgaacaagatcgacaagctcgataaggaactggaaaaagcccgggagaaggctgccgagtggcaggccaaaatccgggagctggaaaagcagaaacaggaggaagaaaacagccagatcgtgcaggcggtgcgctccctcaaactgacgcccgcccagcttatggcttttctgaacgaccccaaaaacagccttaccgcttcgggccatactgacccgaagccggaggcacccggaaaggaggacacagcccatgaagaaaactaaataccgcaggctggcggcgatggctgccagccttttgtgttgcctgatctttacggtcccggcctacgcccagagcagcgagccgcagcccgaggccactcccgctccggtggaaaccgaagcggagccggaaacccagaacccctttaccccggacgggacgggaaccgtggtggacaacgccaccgacgaggacggtaaagagttctacaccatcaccacagcagacgagagcgtgttttatctggtgatcgacaaacagaaaaccagcgagaacgtctatttcctcaataccgttaccacagacgaccttctgcctcttgctgaacagggtaaggaaccgcccaaagaagtgacccctgagccagagccaaagcccaccgaaccggtggaggaagtaccggaacccgagccggagaaaaaggacagcccccttctctctctgctcctgatcggtgcggtggtgctggccggcggtgggattggttactatttcaagatttacaagccgaagcatgaggccccggatttggaagatgattactgcgaatatgaggacggggagctggaggagatcgcagaggaacccgatgacgaagataccccgccgtgggagaaagatacggaggaatgagaatgaattttacaagcagcccttttgaacgaatgatgaaggaagtaccgcaccccggctggaacaatgacgacccttgtaagggatgccgttattacaaggagtgcaaaggaaagaaaaaacagtgccggaagaagttccgggcgctgatcgtggagtcccgcccttcgggccatcgtggcccgaagtcttaaatggacgcccgggagctgacccgtgacgagaagaagaaaatccgttctcttgtcacggggatgtgcgccaactatgaccgggaaagcggcctgtgccttcctcttgactgtgcctgctatatgctgcacaagtgctggacaggggcgtactgccgttatttccgtgaggctgtcctgcctcttaacccggagcttcaagcgtcgttgacaacggaaggcatctccccggagctgcgagcctgtgcggtctgcggaaaggcgtttttgcccgaggggcgtcaagcctactgttccgacgcctgcaaggccgaagggaaccgccgaaaaagccgggaacgcatgaggaaaatgcgggagaaaaggccgggcggctgttacgatttgccgcctccaaaggcttgacattccgggcttttttgagggtgtttccggggtgggaatatcttattacatttctccccggtctgccctcttatttcgtaacatccagcacttcgggtcatgttagcccgaggcacagaaaggagggatctcttggagacagtacaaggatatgtgattttgaaagctgccacctttgaaaccggacacggctttgcgctggggcataatccgggagcgccgagcccctttgtgacctggcagtttaccgagggggaaaccggccatcgggattactactggggccgctatggaaccagtcaggcgtgggcgcagagggactttgaccgccgggtggacgactatcagcagctttaccatgcggcggtcaagcataccgagctgggaccggagggcgtttaccgctattattccacccagcggcccgtggacataggaacttacccgaagctgccggataaccagcctctttccatcgtcaactacgacgatgacaggcggcgtcctgtggcagacggcagtctgatggcatggggcgaactgacctacgcaaagccgctgaccgaaaagcagatggaggattatgaactgaaaccagcaccgggcaatcctgaccgggtgcgcccatccattaccgcccggctcaaagaaggaaccagagggcaggaacccccgaaggagcccggccagaagcggagccataaaaaccatgaggaacgataaaggaggaacgccatgcacgaaaaagacaactatctgaaaaccgccgagctctccacggagcagaactgcaacatgatcgacggcgtacccaacaacacgcccatcccacccacgcccccggagctggacgcaaaaccgcttgataaggtaaaggaaccaaaagagcgccggaaaggccgggagctggaacgctgatggagaaccgcaagcggaatgtccatctgcacgtcatggtaacgccggacgagctggcagccatccatgaacggatggctgaggcgggcatttccaacgccggggcttatgtacggaaaatggctctgaatgggtatatcctgcacatcgaccttgcgcccgtaaaagagctgatctctctgcaacggcgctgttctaacaatctcaatcaggttgccatacacgcacatacctatggcgtgtacccggaggaaatcgacggattgaagcgggactatgaaaagctgtggggcgaggtgtcaaaggtgttgcgggagctctccgagctggtggcaaagtaagacgagggcggcaggcttccgttgcggggcttgccgccctgctctttttttaccacttcgggccagtatgacccgaaggtttgggacaggattcactaatctttcgcaacatttatgtccccgggcaggcatgataaaatagaggtaggaaggatagataaaggaggttttgaagatgaagatactgctgaaaatattggttgctccctttgctttggcgttgtcccttctggcggctctgctggtgttcctgtttgatatttgtgccgtcctgctgacgattgcctctgtgatcctggcggtgctgggtgtcgctctctttttcacgccgacgcccataggtgggattgtatttctgtttcttgccttccttctttcgccgtatggactgcaagcggcggcgggctcccttctttgggtgctggacggaggcaaatccgctctgtaccggtttctggcaagttaagcagcctcgggccatactggcccgaagtcggggcggtctgaatgggccgcccctttctcatggaaaggaggaatgatttttggctaccacaactttgttacagcgccatgcgggcgaaggcgaaacgattgctgaggctatccgggattgtctggactatggcaaggacccggagaaaacagaaagcggaaagtatatctccgcttatgaatgtgatccggccaccgtggcggacgagttccttttggcaaaggccagctatgccgctatgacgggccgggaacagaagaaagaaaataatgtgctgtgctatcagatacgacaatccttctatccgggcgagatcaccccgaaggaggcgaaccgtatcggctatgagctggctatgcgctggacaaaggggcggcacgcttttatcgttaccacgcacaccgataagcagcacatccattgtcacatttattacaactccaccacccttgactgcacccggaaattccgaaatttttggggctccagcttcgcccttcggcggctctctgacaggctgtgccttgaaaacgggctgtccatcgtggagaacccgaagccccggagcaagagcaagtatcggaactatggggagtggcagaaagaccggaaagggccgctttcctatcaggaccgactgcgccttgctattgatactgcgctggcggaacgccccgctgatctggacgaatttctcaatttgatgaagcgggccgggtatgaggtcaagacggttcggggcggcggtatcagcttccggctgactgggcagggacaggaacgcttcacccgtctgcgtgcctccacgctgggggacggctacgacttgcaagatgttctgtccgccattgagggcaaagaaaaacgccccgggcgctcggagcggaaaatcagtctggcggtggatattcaagcaaagctggctgccggtaaggggccgggatatgaacgctgggcgaaggtatttaacattaagcagatggccgccgctcttgcctatatacaggacaatggcctgaccgattatgagcagttggcacagaaagccaccgaggcagcagaccgtttccatgccatttccgagcagatcaagcagacagaacaggccatgaaaaccaatgccgggctaaaagccgcaacggttcagtatgccaaaacccgcccagtctttgagcagtataaggcgacgaagtacagccggaaattccttgcggagcatgaggccgaccttgaactgtaccgggctgcacaagcggaaatgcgctctctgctgggcggggcgaagctccctaaaatggatgtgctgaaggaggaaggccgcaagctcacagcaaagaaaaaacagctctatggagaataccagaaggcacgacgggatatgcaggagctcgtcacgatcaaggcgaacattgacactctgatgggctacaccgagccgggaagaaagcaggaaaaggagcgttaaggttatgaaaataaggagcaaagcgacgctgacacttcgggccatgttggcccgaagatacgggtttggggcgagccccaacaagccgcctttgtgccacttgtggccacagaggcattgcttgccacttagcggcagcccctaaaatggcgcaaaaaaacagaggcccttattctggaacctccgtttctctggctttcttaatgccctcggctgtggcttctatcacgacaagctctttttcattcatggagtttagaagcacgtcaatatgctttctgcaagagcttgacctcgcccctccgtctgcatgaataaactggtcaactgagacatcaaacatggtaatgagtttaacaaaaaggtcgaaactgggatattgacctttgttctcaatattcataatggtacgggagtcacggtctactaattccgcaacataggcttgtgtccagcccttttcttctctggctcgtttgagagccgcaccgaggccgtgaaagtcaaaccttctttcatcttggttcattctcatatcaccctatatcattgtacatttcgggttagattatgagaatgtaatgagattttacataaagtagtatttcatttcatcaatgtgcggcctccaacttgtactattcgagataaagaactataatgtactctgtggaggtgcgaaatggactatatgacattaaaagaggccgccgagaagtggggcgtgacacctcgcagagtaaattattactgtgccggagggcgtatccccggcgctgtgaaaatggccggtgtttggctgctccctaaaactgcggagaagccgattgatgggcggacaagacaagggaaggagttgcgccatgaataaaattttgattatagatgatgacagagaactgtgtgctttgattaaacgcagcgtacaatcggaacatattgaagctgatttttgtaataccggaaaagagggcttgcagaaattaaaagagcaggagtatcagcttgtggtgctggatgtgatgatgcccggtatggatggctttgaaacgctggaagaaatccgcaaagagaacagcctgccgattttgatgtttacatccaaaaatgacagcatttctaaagtgcgaggcttacgggccggggcggacgattatctgacaaaaccgtttgatatggatgaactgattgcccgaattgtttctctcattcgccgctacacccgctttaatcagcaagccggagctgtgcaaaaactggattttgatggattgcaaattgaccttgaaaatcgttctgttacgacggaaaacggcacttttgaacttccaccaaaggaatttgatctgctcctgtactgtgcaaagcaccaaggaaaaattttgaccaaacagcagatttatgaggaagtatggggcgaagaatatttctatgacgacagcaacatcatggcgatcatcagccggcttcgtaaaaaattagaagtcaatccttccagtccaaagtatatccaaacggtcaaagggattggctatcgctttaataaggaggtgtagccgggatggaaatcatcgttttcttgtccattgggattgctgttgtggctgtgttgacctccatctttcttgttcggcgcgtaaaaaagcaaattgcagaaatgaccgacgctttgattgatgtgaaaaatggaaatggtaaccggcgtattctgtctgcaacaaatgaactgaccgcacctcttgcctatgaaatcaatgagatcgttgtgtcctatgaaagcagactttcgattgtccggcaggcagaggaaaccaaccgccagcttatgacgagcctttcccacgatgttcggacaccccttaccacgctgatcgggtatcttgacgctgcacataaagggcttgttacagggaaagatcgggatgattatattgaaaccgcccgtcggaaatcccatgatctgaaagaatatattgatgtgctctttgattggttcaagttaaattctaacgagtttgctttagaaatccagagcgttgaggccgcagagctgacaagaaatatcctgatcgactggataccgatttttgaggataaacaggttgattatgacattgatattcccgaacagcctgtccgggtaagattggatatggacagctatatgaggatcgtcaataatctcattcaaaatgtaatcgctcacagccatgcagacaaaatcaaaattgtcctgtcaaagaaggaaaataacatggagctgctgctggcggataatggagtaggaattgagaaagacgatttgaaacacatatttgaacggctttataagtgtgataaaggacgctccgaaaaaggcagcggacttggtctttctattgtccatcagcttgtagaaaagatgggtggaagcataacagttgaaagctttccgggagaaggaactgaatttatgttgctttttcctttggagatttaagtgggttcccgtctttatggcgggaacctttgtcattttgccggatttcaaattgcaaggttaatgcaaggttgcggcaaggttcatgcaaggttggtgtgatagaatacccttacagaacaggaggttttgaatatggatacaaattacatcattgaaacaaaaaatttgacgaagcaatacggctcacaaaagagtgtggctgacttaaatatccatgtgaagcgtgggagaatttatggtctgctgggcagaaacggagccggaaaaaccactaccatgaaaatgctgttgggcttaacgaagccgacttccggggaggtcaaaatatggggaaaatctttgcaggggaatgaaaagaaattgttgccccgtatcggcagcctaattgagtcccccggcttttatcccaatctgaccggcacagagaacctgcgtatctttgctaccctacggggcgtaccaaacaatcatgccatcaaagacgctctggatctggtaggactgccctacaaagataaaaagctcttttctcagtattctcttggtatgaagcagcggcttgccatcgcccttgccgtgatgcacgatccggaacttttgattttggatgagccgatcaacggtcttgatcccatcggtattgcggaggtacgctcctttattcgggagctttgcgacgcaagaggaaaaacgattctgatttccagtcacattctttcggagatttccttgctggctgacgatattggaattatcgaccacggcgcattactggaagaagaaagtcttgccgagttggagcaaaaaagcagtaagcagattcgttttacgctctctgatactgcacaggcggcaaggattttggaacgcaatttccatgaaaaccatttttctatacaggacgaccacaatctgcgcctgcacaaccttgatctgcctgttgggaaaattgtaactgcctttgtggaaaacggattggaggtatcagaggcacacacctgtgaagaaagccttgaagattacttcaagcgtgtgacgggaggcgagggaattgcttaaactaatcaaatgcgaatttttgaaattaaaacggaagccattggtatttatttccctactgctttctgttttcatgccattggcttatgctttctttctggcagatgtaaacactgatgtcgatgctgtaaatggagtgatgtccagcctattccagcttagtgcatgtttgcttttgatgccgcttcttgtgatactggcttcgaatctgttgtttgaggaacttgataatgacacactgaaaaaccttgttaccgtaccggtaaatagaaccaagctggtgctgtccaagatgctggttttactgttgtttgccgttggctttatggcagttggaggattggtaaatcttgcggttttgttgtttcagggttgggagccggttgggttttggaccttgtttggcgttggaattgaagaagggctgattatgtgggttggcgcacttccctgtattctgctcgttgttcttcttaataaaaactatatcgtgtctgtcgtgattacctttttctatacgattgcgaattatatcctttccatgaacgatatgtttctcacacagccttttggtttgaacatcggaaccctgtttccggggccgctggccttccgctggacattccaattttatgaccaaagccagaccagtgcggagttagcagatttgttggaacgggtcagtccgtattttctgaatggtgttcaggtattcggtgtgattattgtggaagccattgtatttcttgcgctgattgcatttgtttaccggcgacaggaaatctaagggggtgtgactatgtggaacttattaaaatcggaattactgaaactgcgccggtgccagatccttttggtagggctggtggcgcttgcactctgtcctttggttcagtatggaagtcagttgattgtggaggcagagtaccgaaatccaaattatgatttttccgcgctgtttgagaatgtcatctggggaaacactcagatattccttccaatttcattggtaatgattggaggatggttcattgacagagaatccactcatgatacactgaaaaacattatgacaattcctgtttctatgccaaaaatgttgggagctaagttacttttagtcagtatgcttgcagttctgctgggaatatacagcgttggcattaccttgattactggattgacggttggattatcgggactgacagcggaagtgttttttcatggaggtacgcagatcgtgttagcggctctgacgacctatttggtctgtatgccgctgatcctgatttttgggcagatccgaggggcatatctgggcggttccattctggcgttcttccttggatacagcatgttgtttttcaaaggtggtatccttgccagcatctatccgttctctgctgcgctgattttagtgggatttgacatgagtgaatatgccggaacaaccacatcctcaaaccctttgttggcggtcattggggttggcatcatggttctctgggcggtgctgttgttactgatgtccagtaacaaaaaagaaatgaaatcccgtaaacaggcaaatgccaagggaaaaggaaagcgtgctgtacgcaggaaaggaaggtgatagctgtgaagaaaatagttttatcattatgcctgatactattgggtgcttctgtgctttcaggttgtacaaaagatgaatttctcgatcagtataacaatattgttcagtctgctggttccatagcgcttaccggaaattcatccttacaaggtacgaaagaaaaaggaattgatgattatacaggaagctatacagccaactatgaggatttttcagatacagagtatttgttcggcggaacttccataaagcgtgaagctggtaaggatctgtctattgactgcgcgctggaggttacggagggaactgcaaaagtattttggatttctggagctgatgaagcagtcactttgcttgaaacaaccggaacatatagtgatacaattacactccctgaaggtggaaactatatcggcattgaatgtgagaatttcactggaagcattgaattgaatattgagtaacattctgccggacgacggcaaaagaaaaaagccgtcgtaaagcagacacatttccacgcgcctatgaagcggcggctttgattttcagagccgccgtttcttttcgtctatcctaaaccaacgacgacctaacaccgtgtaaatccacggcggcatataggaggattgccgccgtgtctatttttgccttttttcacagtacccatgacctgcaccagctaaaaaaagcgtagctccccctccgggttattccggctatgtatgcgaaatttgttgggaccttaactattatgtcatttcatgcgtccgtgtggcttcatgccgcccgggcgcttttgcgtacttatggggctgcttcgggtcatgttggcccgaagtcattccccggtgccgctccccgccgccttcgttttggtcactcgtcaaccaacaaccgaaacggaggtcaatatggctattatcaatttgcgggactattacccattctatacatcggattgcttcatggaagtatcggaagaagttgcagaaatgttcaaagagtttgatcgtaaagaggctgcctaccggctgcgtacataccgccacaaagcctactattcccttgatcgggatgacggattggagcatgaagctgtctttgtcgtcttatctccccatgaactgtatgagaggaaagtgaccatgcaggagcttcacgcagcgattgccagtctgccggacaaacaggcaaaacggattcatgctcatttcattcttggcatgaccaaacaggacattgcccgggcagagggcgtccatgaaaaagtggttcgtgtcgcaatcgagcgaggtctgcggcgcttagaaaaaattttgaaaaattctttataaggcgtaccgatttaggccggaaaatgaaatggcttatgagaggcaaaacacttcgggtcacaatgacccgaggtccagacaagcctcatgcagattgaaaattgaataaaaagacacccggatacgaaggggaacgcgttgtgtgacagacccgccatgacctcggatttcagagaatacagtctttgtaaaactgagagagcgaataggtccatgccataggtggggcaaggctggctccaccggaacaggcgcagaacccggatacttgcgtttagtcacagcccgagcgttgaaacggccttgcaagccgtgagccgtcgcaggcaatgagaacgccttgccatcagaatggggagagttgaaatactatggggcatgaagcctatgtccgtccggtgtgtctgaaatgaagtaaaaacctatggggagccctcggcaatgctgtctgatgataggtcaaccgatccggcgtggctccccatcttttcaaaaaaggtgcactttatgggaaatgcgtttggaatgatccccggcttggaaccggacgaatggagcaatgacgcttgccgtggttatatcattatggcaatggaggactgcggattttcaaagaaggatatacggcgtgttgtggggcagctttatgaagtattcgacctcaacagcgtggaggacgccaaagaaaagtacctttccagtccttactgacctcggaccacattgacccgaagtggagaaagctcaaagggcggcacctgctgggtgccgtcttttgacatttccccacgggacaagtgggaaaggctggcatatacacgcgctttcgcaaaggaggttttcaatgacgcaagctgtcacttatgaacgagaaacaaagtctgtcgcatttcaagggaagatcattgtgctggaaagcctcacgccggtacttcccccgaaggagaaagaacagcgcaaaaaagaaattgagcgctgtctttttgaggtgttcagcaaatatggggacagatttccttaatcattcgcaacattgttgtccggggctgctgatggtataatatagttgtaaggttggtagctccattccaacaaggaaaggagcccaatatggaatttatcagagaagattgtatttacgcaagacagtcagtagaccgcaaggacagtatcagcattgaaagtcagatcgacttttgcaagtatgaattgaaaggcgggagctgccgggtattcaaggacaaaggctactccggtaagaatacggacagaccggagtttcaaaagctgctgggcgagatccgcaagggaaaggttcggcgggtcatcgtgtacaagctggaccgtataagccgctctattctggactttgcaacgatgatggagttgtttcaagagtacgatgtggagtttgtatcctccacggaaaagtttgatacttcgaccccgatgggccgggccatgctgaatatctgcattgtattcgcccagcttgaacgtgagacaattcagaagcgtgtcacagacgcctactattcacggtgcctgaaaggctttcacatgagcggacaggcaccatacggttatcagttagagcctactgtggtagagggtatccgcacaaagaaaatggttgccgatcccgtagccgccgatcatgtacggctgatgtttgagatgtacgctgaaccggaaacctccttcggagatattacccgatacttcgaggaacatgacataaaaatttatggcaaatccatgttccgtacatttctttcccaacttttaagaaatcccgtttacgcacaggctgatttagagctgtacgaatttttcaagagccagggcgcagcgattgtcaatgacgcttctgactttgccggaacaaacggctgctatctctatcagggacgggatgtgaaggaggacaaggacaggtgcttaaaagaccagatacttgttatcgctccccatgaagcactcatttcctctgacacatggctgaaatgccggaaaaaacttatggcaaataccaccttccagcagggacggaaaccgaagaacacttggctggccggaaaaatcaaatgcgggcattgtgggtatgctctgaaagccacccatgtaccaaacagcaccggatatttccgctgtaccaaacggacggaaaacaaaggctgtccgggctgcgggaaaatccgcaaagaagaatttgagcaattcattttctcggccatgcaggaaaagttcaaagactttcagatactccacggcagagaggaaaaagtcaatccgaaactgactgcctatcaagtggagctggcacaggtggaggcagaaattgaaaagctgctggatacgctgaccggagccaatgcgaccttgcttgcctacgctaacaaaaaaattgaagaactggacacccgacgccagaccatttcaaaggcaatcgccgaattgagcgttgaaaccatatctccccagcagataaagaagttatcctattatctcgacaactgggacagcatagattttgacgacaaaagaaaagccgccgatggtttgatctctacgatcaaggccaccagcgaccgtgttcagatagagtggaaaatctgacatttccgctctatcgcccctcatttctattttatcttgtttgtaccccttgtacaccgatgtttatgtgatgtacggtagttgggaaagtaaattcagcagactggaaacaaatgaatttgataaaattgctaagttgccggcaatgttcagtaacctgattgatattgttttctggaatcgggatgcagaaaataatcagattacgattcgatggtatccggcaggagagcagagacattatttgtatgaaatgactttgaatctggataccatggaaaaggtatctgaggatgacccatatgatttgatagaaactggagaggcttatgcgaaaacaggatatatttatgctgacagtgcagaagcatatctggatgaaatcgaattaaatgcaaaaaatctggaattaattagtctttttgggaatacaacgggtataaaatatgaaattcgttatgccatcaatgaaatttatgcccgcaaaggttatgatttcactgggactggttacgaagactatttttgttcgaaagaatggtatcatccaattgccggaaaacaggtgacggaagaagaattgaacgtatatgagaaagcgaatatcgatttactggtgaaaatagagcagattgtaaaggcagctgacgcagaaaatgaaaattagaaatcgggaataaatgaatttttgaaagattgaaaaacgggaggaatctacaatgttgatgaacacatctattaggatcaatgatagcatgtctttggatgagaaaaagcgtgcgatacaatcaatcgttaaattagcagacgccgctattttgaacaatgaagatagctgtaagttcagagtggcatttgagagaagacttgatgcatcaaggttatttcataaaacgccatatgatgcgtttggagttcgggacctattattgcttgagtctgtattagaacagcaattttcagaaatatctgattctattaagattaaaagtgtatttgcagaggatagaagtgtatttggagatgttatcaataatagatccaggcaaatttccaaaggtcaatggagaggacttatactgagtgccacaccaaataacacttatcgaagggaacgtttatcacaatattctgacagaaaatttatgaaaaaagtattatctgagcatcatccaatacttgaaaagatatatgctgttttagatggcaacagcagtacatatagtcagcttatacaggtaagctgttcatatatcggtccgtatacggattgtgatgaatattgtgtgaagttttcgaaattaggaatgaacaatttgaaagattcatttcaaacctatcaaatgacattagcttttattgaatttttgagtaaaaaaggaattgtctgcagtacgccgaaggctaaattggcttcgcgtattgcttttgatgaaattgtctttgaatttacatgtaaaaaagctttggaagcgaatagacggggaaaagattggtagtatatgagttaatcattttttcggggaaaataattgaaaaatgggggaaatgaggtataataaagaaaatactgtttctagaacgtatctacgagggattgaagctcatttgagaaaattaatgccatattgtaaaacaagttagaccgtatctaagagagattgaaaccattgcagcgacctcctgtggtagcgtatcgtataagttatactatacctaagagagattgaaacaacaaaatgccaacaccaagcaaaagaatcttttttatccatcggatgaaagtccgaaaaggatggaaagattctttttttgtttttgtacgaaatttgtgaggaaaattccaatcaccagcagatataaatgatagaacgtcaaaagtcgtgattatgtgttttaatctatgaaaggtgaagcggtatgtcgaagtatagaaaaaatgaagaagcaattatcagacgagtgaagcagctgaaagggccgtgcccggatttttatattatcgggcattcgacttcggcgatggagcgacttggattaaaaattgccgaggtgattgatcggcaggaaatgcttccttttaaaggattagtgcggacttttaccatcaaaatgccttattatgaggactggcagggcgccggtgctttcattcagcatctctgcgacagctacagtattgccagagactgttatgatacttacattggcaccattgtggttgagctggcagaagaatggggaagaagcggctataattcgtctctgagagtgtttctggagtatatcgcagaacattcagatatctgctttatactgcttgttccggccggtcagaatcaggaaaaggatgacgccttatttgctgagtttgttcgatatggggtgtggatgagggtctattctcagacaccatctgttgaacagtgtgtaaaacattttgtgacgatggcagaaaaggaaagctggcgtgttcaggcagaagctgagcaactgttggcagaaaagctaaaagagagaagcgaatcagagacagaaaatatcatcgttgtcgagcagcttttcaggcagatttattttgaacagtgcatgcaaaatggcaggagcaaagtcatcagagccagggatatcggtctgatgccgggaattcagaaaagagaagctgccagaaccattggttttgtgtcggagcagtgatgacgaaaacgggaaaggattgggataaattcaggaaggaagtctggcgtaaattcaggatagagaacagaagtcgatgcagggtaaaagaacaggctaaagaatagggagaaatacagatgtttgaagatggtcttagatatcaggatgccagaatggcatcagaagatgaaatgaagcgtgatttatatgggtttcatatcaatgattcacggcggatacccaagggcggtccgattcttttcagggaatcggacatggcctatgttgatccgagtgaggtgcacagtcttattgtgggagatacaggctccatgaaaacgttgcgtttcgtcctcccgctgatttattcctgtgcaaaagcgggagaatccatggtcatcgtggatccgaagggcgaattggttaggaaaacaaaagcatttttatcagaagccggttatgctatgcatatcattgacctgcgcagacctcaggattcaccggacaagtggaatcctatgggatgtgtggaaaaatcctttgctcagggaaaatccggtgagcagaaggcgattctggaattaaatgacctgatggagacgttatttaattccagatcaaaatcagacaaggacagatattggaatgagagtgcgggtcagctggctcttggcttatgttgcctcatgcaaaaaataggcgaaaatctgaatatgaagaaccttctgaaatggcgttacgaaagaatggaaaatggcgatttggatacgatttatcaggagctgccaaagactggcgaaatttatcagaatctggcaggctatatggaattgacggcctccaatacccgttcctgtattttgtcaacctttgaccagctggtgcgtcttttcaaggcctcaccggcattaacagatatgttatccgagtctacatttgaactgagtcagataggacttcgaaaaacagttgtttttcttattgtaccggatgagaagacaacttttcatttcctggccacactatttgttacccagtgctatcaggcgttgctggaaactgcgtcagactatcaggacatattgccgcgccgggtgaatttcatacttgaggaattttgtaatatgccgattctgccggatttgatttccatgctgacagctgcaagaagccgaaatatccggttccacctggttatccagtcctattcccagatgatagaaaaatatggtttgaatgccagtcagacggtattggacaactgcggcaatctgatttatctccattcaagagaaatgtcgtttttaaagtatatctcggaactggcaggctgcaatgaatatcatcggccgttactctcctcgtctcggctgctgcatttgaagaaaaacgaaaccgttatttttcatgacaggtgttaccctatggttgtgcgggatattccgctgatatttgaatatccggttagctctgaacagttacgatttttttcggaaactctgagggaaattccatccgatgacagataatataagtaaagtgaaaattattaaagatacaatattaataaaaaatgtcgaatttaaataacttttttaataaaatatatataaaaaaatgacctgctattagtatgtatggtatactgaagatagtatattttagcgcaataacgcatgaaaaatatgaatggagagggaagaaatatggttgtgatagagttttttagtgagacccccattgacaatatgatcagtacattgacaagtcatccggacaaggtgattcttgtgggacagtccaaaatcatccggaagaatggcaaagcctacgagaagtttctggtttctgtcggcaatgatacaacgcagattgactactgcagtgtgattccgcatgatctggggaatattgtaactgcattggagaaaattgtcatggattatccggactgccatttcgatttgaccggtggggatgaactggctatggcggccattggcatcgtttatgaacgacataaagacaaggggattaagctgcaccagtataatatccggaccggtgttgtctatgactgtgatatggatggacgtgttttttcatcagaaataccaagcctgactgtggaacagaatataatcctgcacggcggcagtattgtgacggatacccagcgggcaggctgtacctatccgtgggttctggatgaagaatttaccgcagatgtgtttgccatgtgggaaatttgccgaagaaattgtgccctgtggaattatcagattaccatgctggcagaaatgatgacatttaacagtgtgatagatgatgatttgcagttatgtgccaacatggaagatgtccatacctgtctcagggcccggggcaatactttgaatctggatggcatatttgggccgctgacagaagcaggcatgattctgggattcggcagagatgatgagatgctgcagttcagatttaagaatgagcaggtgaagctgtgcctgacaaaggcaggaacattgttggagcttgtgacgctgctgacagcgaagaatatgaagaaatcagacggcacgccgtattttaacgatgtgcgaaccggcgttatgattgactgggacggtgttgttcacaacaataaagacggcctggtggatactgaaaatgaaatcgatgttattttgatgaaaggtgttgtaccggtgtttatctcctgcaagaacggtataattccaggtgatgagctgtacaaactaaatacagtggcggaacagtttggcagtgaatatgccaggaaagtgctggtggcgacagacatgggaaaggctgccaaaagtagaaaatatttccttgagcgtgccagggatatggggattcagattattgaggatgttcataagaatggatttggaaagcttgaaaatatattgaaaaccatataaaagtttgagtgaaaatgtgaataaagccagatagaaataataaaggggttgtgaggggtgcagttaaaaatcaggcatacactttcagaggagctggcgctgccgctgagctatcatcatatcatacagagtattatttaccgtggtcttgcagatgaatcgggatacagtcggcatatgcacaacagcgggtatgccgccgataatgtgaataatatgggacggcggtacaaattgtttaatttcagcctgctgcggggcaattaccaagtcatcaatgggcagattattttcagagattatgtagaatgggagatcagaagcccggatatttacatgatgcgtcttctggaaagcgctttcagaaaaaacggcattcattatggaaatcagcatttttcggatgtggcgcttcgcctgatgaatgaaacggttgaaaaggacagtattcatattcgaatgctgtcgccgatatgtctgtattcgacaaataaggagacaaagaagacgtatttctacagtccggaggaggaggctttcccggaacaggtcaatgacaattttgtcagaaaatatactgcctgttatggtattccaccgaattcgggaatagagattgagacggtcaacgtccggcgccgggacaaatatgtgacgaaatacaaagaattctatctcagcggctggcttggagagtatcgattaaccggtgagagaaaatatctggatttcctgtatcagacgggactgggcagcaggaatgcccagggatttgggatgtttgaagagagtccacagagggaataagcagggagaacggaggatacttatgggaaagcttgaatttaatggatgtaagctgaaggtacaattggaagcgcagtctccaataatccattttcagcatgatcaggcaggagcaactctcagagcttcagaagtcaagccgaaactggaccgatttcttttgaataaaatggaacaggaaacagggaaaagagttgctgtattaaaagaagataatggctatgctgtgatgtttacagataaagaacataatgcgttgaactatcgcatgaattttgaagttccgggtaatgcctattgggtagagccgggaacctttaaaccggaatcctacagtatttactatggcaatagtggtgtgcatgatgaaaaagaaaagaagaaagcggtttttaccaatcctgttatgaacctgatgtgctttaatcaggtattgaggaattatatcgagaaatatcttgtagagttttttgcagtcaccaatttcggaaccatgcaggacaaaggtttcggaagttttatgccaaaggaatgtttgcagaaatccggagaattgacccttgaggagacaaaaagatttgcggagatgttaaagcaagcagcaggatcagtccattgctacagcatgtcatttgtgagagtaccggaagaaatcaatgctaaaaatgcatggtgtacaaaagtgtttaagcagattaaagatttttatggcattatgaaatcagggcagaatttcggcgggtacagccgttcctatttattccagtatatgcatggaacagataataaaggtaatagggatgatttatccatagacaatgagaaggcatggctgaagcagaaagggattgttccgattatagaaaaaaacggaaagacggacagagttgacaaaaatccccggtatgtgcgtgctttgctgggcgtgggtgcgggtatgtcatttatccagaaggatggtaagcggttaaaggtaaaaattaatcacaaaaagggtgatggagatgccatcgaacgaatggattcacctgttaaattcaaaatcatcggaaacaaagtttttattactgcggaggaagttccggaggaaatttatggacgcatgtttgagtttcaaaataaagaaagaaattgggacggcaataaaagaggcagcctgatgacaccatccaaagaagattttaaggatggaaagtttgatattcagacattcctggcctgttatgttaattattataacagcagaaaactgagaaaagacaaattgccgtcaattgcaggtaatgtcgaagtccaggaggtgaaatagggatatgtcagatagaaaatatataggcatcaccatcggaccgattttgcagacgttggaggaagccggtacaccggcggcattatggtttgccagcagctatttttcagatttgaccagaagaatctgtcaagcgcttacgatacatatggaaggcatacagatatattcaccgtattattcagagacaacagtggataacgatggtgtgggcaaatatcatgaccggattattttttctgcggatccttttgacgaggcaaaactgcgggaaatcatcgcccatgtcaaagaagattcacttgagaattttatttttgaggaaaaagataaaggcagtatagcgtataggcatgcgaaacaatttcttgaacaatatctgcaagtgcgctttgtagtgatggatgcagagcagattgaacagaatagcctgctgacgttgtcaccgtatctggatgccatggagttaatgaagacttttccgccggatgagactggcaatccattcaaaaagctctttgatgagaataaaaatgcaggattaaagaagtctgcactttttaaaagaatggacggaagtcacaatcagtttattaattcgcagggcaatattcgttccattacggaaattgcctcatgtacaggccgtgtttcaagggaattaaaaagaagccattattttgcggttgtgcaggcggacggcgacaatatgggtaaaatactttcaaaattgaaagatgatgaggtccggattttttcaaaagcctgtctggaatattcaggagaggcatccaaactggtgagcagattcggaggcatgaccatttatgccggcggtgatgatctgcttttcctggcaccggtgtcgaatggtaaaggacagaccgtttttgaattgtgtcaggagattgcaatgttatttgagggcaaaatgaaagataattttgtcggattttcatcgtgtcctaccgtatcctttggtatctcgatacagtatgagaaattcccactgtatgaggcattgaatcatgccagaaacttactgtttggtatggctaagaatcattgttatagtggtgaggaaaaagcagtcaagaacagtatggcgattgaagtgcagaagcacagcggacagacaatgagccttgttctaagcaatgtggacatggatattctgaagaagatattggcgttggatgagggaatgaaggacggagagcaggctgtgacatcgatattgtttgttgtcgaaacctatcagtttcttctgagcgttttgaataaggaagcccgtgaagggaagatatcagaagaagattatgaaagtgcctggatgaatttatttgacaatgcggagcaaaagccggcagaaggatacctccggcggatatgcagcctgtggtatcgggatattttgacaggcaatggaagaatggaagcagcagatgcttattcaaaggataaagatatggctgtgctcgtgaatttgctgagaattaaaaagttctttgcggaaaggggaggggagtaatgcaatatttggttaaaatgacacctctggaaccctattgttttggaaccgaccagtcagcaccttatattggtgctgaaaatggcggcaaagggacctattttatcagaagtaaagcgcttccggagcagaccactttgttaggtaccttatgatgtatgattcttgaaagtcagggcctgttgaaagagaattttgactatacaccagaagaacgtcagcagatggcggcatgcattggcccggagagttttcgatttatttccgaaaagaagcagaattttggttatatcaaggagatttccccgttgtttataatcagtccggagggacatatttgtatcaaaaatcctttaaataataaagcggatgagggatatgatccgatgaagatgaccgatagaacatttgaaacatcggaagggcttgttcatttgccgatgcaggatgaatataatgcaaaggaaggctatgccgacgggtattatgacctgagcagcggtcggatatacagggatttatttaagaagatcatcaccaccggcaaccgcaaaaacaggaggcctgatcagacaaataaggacgactgtttttataaacgggagcttatctgcctgaaagaaaattttgcttttggattatatgttcatgcagacaaacttccggagagagccgtggtttatatgggacaaagaaagtcggcattccttgtatctgcagaaattagcaatgatttgccgctggcagagcaagtggaagaagcatttgcaaagtgctccggaaagtggcagtatgccttatcggatttgatagtcgatgattcgtggcagacaaaagatttctttattgccgaggaaaagcagctgagaaatcttgaaactatctatcaggaaaaaaagcatgtgggcaggttaagaaaaagcagtcggaggttcaactttgtacagaggggcagcgtgttttatggtccggaaggaccggtaatgtccaatgaaaacagtcaacagattggctataattatattgttcagctgggaggaagataaaatggcagcaataattgtaaatcttgagtgtatgaccaatatgcatgtgggcaatggggatgttaattacaatattattgataatgaagtagaaaaggatccggtaaccggttatcccaccatcaatgcctccggtgtaaaaggggcattaagagaattttttaatggagattccgagttaaggcagtatgtttcgacattatttggtgcagacaaggcgggagatacgacgccgggacaactgaaggttttgtgtgccgatatgattgcccgtgcggcaagggcatcctcagggaaacaggcttattatctgattacgacacaaactgctttggataagtattgcaataactgtgagatattccttggaaagcctgttgtttatgaaaagaaatcagctgacgaaagtgaagctgcagagggcttccgccttgaagagaaggtggagttgaacggcaagacactttatattttgccggaggaaacctttaagaaaatagaactgccggtgcttgcgagaaataaactggataacggtatcagcaagaatctctggtatgagcaggttgttccgcatgaaagtctttttgcatttgccgtattagggacagaagaaaatttggcgatttttaagaaagcggtggatggaaaagtggttcagtttgggggcaatgcttccattggatacggtctttgcaaggtttcggtgaaggaggcataacgatatgaataaagcaatcattaatgatgaaattgttattgcctatgatgtattaaaaaaatcagaaattgtagaaaatggtaaaattaagaaaacatggagaggacagatatcgacatttggtgcggctgtgaccatgggtagtctgataccggcagtggcgtttttctcggaccagggcggttccagtgtaaaaaggcagtatataatggatgcgattcttgaaattctgaaaagagatcatattgcgccggagaagtaccatacgctttttgaatatgtcagggagcagggagagcattgcagggaagatgtgttgaatgcggccattgcgttaaagctggcgatgaatttatacaccctggaaaaggagtaggaggcagttaagggatgaaatatacttcagaaaacatgaattatatttttaatgtgtcgtatttttacgacattgactgggctgcctttggcagcagcaaagaagaaaatgacagcatattgaaacagcataatgatgctatcagagacttttcttttaaaacagcatccccggtggaaaaatggcgcgcattgcagatgaaaggctatacagattttcagctctgcacgcagtatccggggctgatgattggaaccggtaatgaacattctctgaaaatggatggtgctatcaaatgtggattttcatttgactacacaacgggactgccttatattcctggttcttctttaaaaggtgctttaagagcctgttttccgggagatgggaagaaagaagagatttctcaggaatacgcagcgtatattcgtgcacttctggataaggaagatgtggatattgagcagttgaaagagaatatatttgagaatcaggatatatttctgggtgcctttccggtgattggttttaccgggaagaaattgctggagatggagtttattacaccacatacgtcgggaagattcaaaaatcctaatcccatcagccagattaaggtcagaccggatgtaaaattcgatttttgttttattttgtcggatgattgttcggaggacggtacagtgattgtatctgctgaggaaaagaaaaaattgttcaaacaattgattctggatatgggaatgggcgccaaaacccatgttggttttggtcatttttcagagagacgaccgatacagcttcgggagattgcagttagtcagccaaatcgcacgaacaatcggtacggacagtcaaatcggggacagaatcagtacaacagaggtaggagataggagaaatatgaagtcaacagagccggtattgctggcaaaatgtaatcacatatttgcatggccctttgaatatcaatggccaaaggatgatgtagagaattatgcagagccatttaaaaaaaagggctggatagagaaagacatggatattcagggaatgcgcaaaaacggaaagattcagaaagatatctttatgttgaaccagtacctgagttcttctgccaaagatatttttatgcagacaggagaaaatatatgcacgattctggaatatccatttgatgaaaatgatgaatggaaatatcagataaaggtggaaaatcaatactatttgctgccaattcaatctgttgagctgcatgtttacaggcatggtgtgggtattctgtttatacagatgagtaataatgattatccatctcttcaggatattaaaaagattaatgattatggaagacgaatttctatgccgcttataccggatacgcttgaaaaagacatgctgtgtgcagatgaaattggtatcgttggccctaaagaaaaatatctgacgaatttcagagagatagcagaacaatgtctgaatgaagaagttgttgaagaaaaagggcttcttgaatcggcagagtttctttatgcgcttctcaactgtcgtgttggccgggagacttcggaagaagattttgccagcgatgaaattataccaacggcggatgacaggatgcatgttttttgcctgctaagagatgcggaattgtctagaaaaataagtacaatggattggaagcatccacgaaatagcaatgaggaagaatttcaaaagctgctgtattctattgtgtttgttgaccctgagtggccgacctgtcagaatgcggaaatgagagcggattttcttgagaaagccctttatctcaggtggcaggagtggggaacgatttacagtgtgacgagcttttcttttttctgtatgacgggagaatcggatgagattgtcgcgaatgttctgcgtccatttatgacagaatatctgtatttgctatcattagtacttgcacagagaatcggcattgcgggctattccggcaaagccggacgtattgttcgaggtgttgataaaaagggaatgattgataaagcacaggcagaaactctgattaatctgcaggaaaagtacattacctttaaaaatcagattctgatactggaggcttcctgtcaggagcagggaattgacatttatcatctgcttcagaatcagatgatgattcaggaggagcaggccattcttgatgaacagttagaaagtttgtatgaggcaacaaatgtaagtcaggggaacagagatgcctggtggcagctgtggatcgcaattggggcgattgtcatagatgtaattgtcaatatcattgcgattgtagcggatcatgggtggagtggaatgctgcaatggctgtatgatattctgggaacgggagtgtaaaatgcagacaaaatttctttttatagatgcagaaaccgatggcctttacggttcatttctgacagtagggctggttgtaacggatgatgcgggaaatatgatcgagaaagcctattatggcatcataaaggaaaatatgatgattagcgatgtctggacgagagagaatgtatttccggtgctgggtgattatgaagcctgtgaagatgaagcagagctgcttgaaaaagtgtgggctttctggatgaaatacagagaggaagcttatgcagcggcggatgtgatgtatccggtagaaagccgattatttatgaaatgtgtcatgaataacgagtcggagagaaaatatctggggccatttccaatgctggatttgagcagcctgctcatggcggcgggctatgacccgctgatagacagagcagaactgctggatgaggatgaaaagcagatgatggcgaataaaacgcacaatgcgctgaatgatgcagagatgacggcagctatctggtttaaattaaaagggtatttaaaagttaaataaaaggtattctaaatagcaaaaacagggctccatgccggcagtaattaatcgatattctttaaagtgcgcctttttagataccggacgccatataagataggaaataaatgccggtaatagtgtcatgatgataaaacctaaagtggtttctatatcttcgaacagaaaactgcgtactgtacagataagtaaaccaaaagtaataataacaaaattagtgaagaaatatgctctggcctttccatagaattcgggagcactgtaaaattctatggttctgtttatggtgactgcggcaatatttaaatcttcgggcagtatttcttctttactgagttgtcgaactttgctgctcatatgtggcctccttttgattgaaactactggtttttttgctttacaagataaaccataccaataacaaaaacaatgacacccgaaagtatggcatacgggacttcattgctggtaggcaaaatggctctatcgtaaagcacggtagcaagtaggccgataagaaccatgagaaatattatgaaaccgggaagccaaagtatttttgcaggcaatggtagttcgctgaatttctgatccggcctgaagtagaagccggcaaagaaataagtgacaaaaagagtggacagaatataacggacagcggtattcattggcggaaaaaacacagacattcgcatgctctgtgaaaatccgaagatagcaccggcggcgcataatattaaaccaataatggcgagtgttttctggaattttgataattctttctttttcttgttgttcatttcaaatcctccttgtataacgggttttaagctgcatttggatttttatcaatagtagtcgtcgtgactggctgaaaatatggccagaaaggctaataaaatgaggaggcataaaacgccgatggagcagacaaacatcaatggcaggaatatgacttccagtatattgctgcacctgtcccagcaaataagcagattgatgaggcctacaatagcgcatacagcggttatcagtataagaacgatacgttcacccatggttaccggtttaacggactggtaggcactcatcatacatataaccggaatagcaaggcaggcataaaaaaccattgaattcgaaaaactgaatatttttccccagtgacttctaaagggcaggtagataataaaacctgcgattgagatataaagaaacaattcacaaaggtcgctgaagttggtttccaaaaagtaacataaattttccataacaatttcctcctaagaaatgtattgtgatgattggttacgtaaatataatctatatgggaatccatttttcctcataaaaataaaaattttacaaaataagtataaaaagaattttaacggggaacaagctgtgacggaatgtgtgctgaatatggacggcattatgtcacagctttgtttttcttatattgttttttgcaggcataaaatgtctttcttcgttggaaaatatcgtttagtctgctaaaataaaagataagaataaacggatgttgattgatagatttgtatattgatacggccattgctgtgtgagaatcaacaagagggacggtgcgggaaaacaatggattatgagaagatttttttggactggaagacgagaaggacatttgagaatgagatgccggagagttctgcagatagtaagaatgatacgacaaagtgtgcgggaatgtccgatacgtctgaacggaatgggagtaagttatcaacactttgtgagctgacgatagaggcgggagaacttgagaaggcacttctggataaggtctacggacaggagcatgcagtcagtacctttgtaactgggtattttcaggcgaaattattgtcgatgacagacccatccaggcgaaaacccgcggcttcttttttgtttgtcggtgcaccgggtgtcggcaaaacttttctggcggagacagtggcggaagcactgcaatgtccttttgcccgatttgatatgagtgaatatgcggataaggatgcagtcattgaattctccggggtagatggcgtttataaaggaagcaaggaaggcaatgtaacgggattcgtgagaaagcatccgagatgtgtcctgatttttgatgagatagagaaagcacatatgaatgttctgcatttattcctgcagatactggatgcgggacggctgcgtgatagctgtacggaccaggaggttttctttgaccagaccatgattatcctgaccaccaatgcaggcagttctatttatgatgatgcacggaacacctctctggacagcgtgccgaagcggactgtgatgcaggctttgcgtacggagtgtgatgcaaaaaccggcagtccgatttttccggcagcattatgttcaaggttcgcatccgggaacgtcattttgtttaaccggatggaagtgcgctatctaaagcagattttggagtaccggctgaagaaatgtgtctccgatttagaacagcaatttcagatacaggtacatctggatgacaatatcagcaaagcgttgatttttgccgagggcggtatggcagatgcacgaaccatcagcggacgtggggagaagtttctgagtgaggaaatttatgaactgtttcagcaggttgccttcgggataggtcaggggcaaatcgacagacttcagaaaatctatttcagtgttgattttaaggatgctgcattggaagtcagaaatttatttcagatgacggcggatatggagaagtctgtgcggcgattgaccagatatcatcaggttgtggattatagcagcaagcggcggttagcagaggatgtgacatctgcggaagtcgttttgacagattttcaactccgctatgcagtagaaggtgttgattccgggcgtattcttgctgagacggaacggccgaatgtgacttttgatgagattataggtgcagaggatgccaaagaggaactgcgttttttcattgattatatgaagcatccgcagcagtacatagagaaaggctttcatccgccgaagggcgtattgcttcatggcgtaccgggaaccggtaagaccatgctggccaaggccatggcgacagaagcggatatgacatttatgtctgcggagggcagtcagtttttgaaaaaatatgtgggtgaaggaccggaggccattcatgcacttttcaggacagcacgcaaatatgcgccgacgattttgtttattgatgaaattgatgccattggcaagaatcgacagagcgcaggtgatagcaacagccgggcggatatactgaatgcgctgttgacggagatgagtggatttaagacaacaggggaaagccaggtttttgtgctggcagcgacgaattttgatgtggagggcaaagacagattttcactggattccgcattgcttcgacgttttgacagaaaaattctggtggacctgccaaacagagaggaacgtttgcggttcctgaagcagcgcagggagaagagcccggcgctggccttcagtgatgaagaagccgacagaattgcagccggaagtgccggaatgacattgtcacgcatcaaactgattctcggatatgccatgcgctgtgcagcgcagcagcgttttgagaaagtcacagatgacatactggatgaggcttttgcttcttttgatgatggtcagacagaggcactttgttcggaggaagaattaaagcggattgccagacatgaggcaggacatgcctttatatgctggcagaatcaacacacaccggcttatctgacggtgatgggtaataagagttttggcggttatatgctgcaggagaatgaacgccgagcatataatctcaccaggaaacaggtttatgaacggattcgggaagcccttgccgggagagctacagaaattgtcttttacggcaaggaaaacggagcatcatccggggcagcggatgatctgaaagtagcaacacagctggctgagaagatgattggccagtggggaatggatgacaccttcggaatggccgtgattcgggaaaaggatgctgtatgcagtgacgtggaaagcaggctccgtgaaagagtgaatgccatattacggcagatgctgggtgagacagtggcacagattaagaataataaagaaagtgttgatttgctggcggaagtgttgattttggaaaaccatatggacggcaggaaaatcagagaactgttggaatcaaaggataaatatacggtacggtagatacggatttaaaggataaatgtgtgatgcatgagataggaattgaatggatgactcagaaggaagtcaacggccattttctggagctgagaggtataccggatgaaaagctggaatgggaacgaattccggaggcgattgcaggtgctaattattacaatatacaaaacattcccggtcagttgacggttgaaccgaattccggaaaaatatatttaaaaattcagtatgtcacaggcgcagatatcagagagacgacaataacggatgcactgggacggtatctggaagaagaaatggcgaaaatctgtcaatgggtggcatttctgaatcagaccgaaaaggtcataggaagtcaatggctgccgcaggcggccggaaagatcggctattctgtggaagataaatttttgatggcctgtgaaatggaagaaaagttgatggcggtattagatacttatactattccttacatggcagattcggaatgtatgggggtctgctgtgaatggcatcgggaaagtcaatcccagaggtatcatattaccatccgatctgcagagatgatgatgacaatatcaacagtattatcaacacctatttcggaagaacagattccggataccctggaaacatgtatggccttaaatcaggaagcctggggaagtttttatttggatgatgatacgggatgtgtcgggtatcatttgacagcggtttacggccgacatgtggataaggactggatagcggcacagattgccttagcggaggctgctatcggagactggaagaaaaaggaagatgattggcgtgcacaagcgcggtaaaagcagattttatatggagagaaaggggagaaagctatgcatgtgaatcaggtacgtctggcagaaaaaacggatagtatctcatgggaggaacagccttccgagtggacagcagcagatacaggcagtaatgagattgaaaatatgatacatcagattcaggattttgggcggattgctgcagctgacggagaaaattccaaagcattgcgtcagatgcttatgacgagacaggggtatctgaaaaaaggtgcagctgttttctttgacgaaccgggtctgtgtgaactgcagatggctgtttgtaaggatggaacaagacataagattacggagtcgcagcgcgcgcaaggtgcgattttgcaggtaattcgggcagctgagcgttttattttagaacgaacagaggggtattcagagaaaatactgcatgaattgctcatcaatgcttttgtacatagagatttcaacagtacccaatgtaatgaagtgttgatttttgcggatcatatcgagatatttaatccgggggcctttccggagggatatgaagtggaagattttacgagcagagaacagaggccggtgccgcgaaatcctctgattgcccgcattctttattatatgggctgtacagatggcataggaaacggacttcagaaagtatcggatgtttcatggcagttggacaaaggcggtgtgacagtatgggtgtccggcggcaggattaaatcaatacaaccagcggatgttgattttaataagaatgaaaaaatgattctgacctatctggaaacacatgactggctgacgaatgcggctgctagggaaatcgtccatgtggggacgacagctgccagaagcctgctgaatgggctggtggacagaggttatctcagggccgaaggcgaaaaccggggaagaaaatactatctggcagcaaaaagaccgagatgaagacattcggaggtgaatacattcgaatgaaaaataagagcgtcttcaatcaacagacgcatatgagaaagaggaaagaaaaatggccggagatcggatgatgcgctatattgtgcctttttattttgatggggcatatgaagaggtttgcaggaaattgtctgaggcctcagatgaatgggaaccgggacaagtggcctgccgatatgtttatcgacatatttaccagacggttaattatgcaaagggtgaaaaagagaaacagggtggagtctggagacagaacagacaatcagctaaaattaatttatggctcaaattgagagagaatgaggcgagatatgcgaccatttcagatagtggtgtttacttattccggaccggaattggtttattctggtatgagatagatttcaaagatacagaactgcctgtagatacactgattgaatatgaagatcaactgcagacctttggattaaataaacgtgagcattttatttatcgtgtggcaggcaaaaaaagttttattgtttcggatcatccaaatttaaaagaggaaaaacagccgatacttcagataagagaagagaaagcaccaataaccgggaaactaattgaagtttatcatcgtgtgccggcgctttcaggtaaaaatgtttatctgtgtgcggattttgagaagcacaccgagacgcctgtattggagaagaaagaaaatgagcggattgatttttgcctgaccagactggaacagaatgagtcagaggtaaaagcatatatcagtttcagggaaatagagagtttttcaattccgcagtggatgaatgagaaattgcaggtactggactgtgggatttctttctatatgatggaagggattaagagtaaaaggggcaaaaaagggcagagtgaaacaaatggaccgcggcgggcgctgctgtacaattatttttcctttgaacaggaagcagaggcacagtcagatgaaggacagcgcaagcagatgctcctggacagagcggattttctgacagcagggcataataagaattttctgcgttcaccggatgtgtcagaatatgtttatcagccatttaaagatgcctattggtatgtatccaatagcggatgcggatgttatgtgtacaaaaatgaggagaatcggcattatttaaagacaaatctttcagataacgtacgaagagattattttatgatttacatattgctgctgtatcagctctattcactcattcatttttcggaaaaaatcgagtatgaactgtcggcagatgcgaaggactatctgaaggcaccggaagcttataacctaaaactgaaagaaatacaggcagaaatcaacacttttttattaaagagcgtacatacttctgtcagtcagatgcagacgcaaaacgatttttatcagtttgccaagaaaaatctgcgtttgagggaagaaatacagagtctgacggccggtgttgatttcctggaggaattgctggaaacccaggaggaacagcgcaggcaggagaaggaaaatgcggagctgctgcaaagacaacaggaagaagataaattatctgtgggtgttgctgttctgtcgctgctggccattttatctgcctttgcggatggcattggatttctcaatgaaattaaagaagcaggcagtctgatgaatttgtgtcgggaaaatatcgcatatcctatcattcttgttattgttgtgctgattggctttgtggcgttggttgtatgcaaagattcagcggtcagatactggcggagcaaaagaaaagcgcttgatcggaatgtcggcgaataaaggagaaaacaaaagatgaacaaagacagaattatggcctatatcgacaatcagtcagaaatcaaaaaatgtgtggaaacacagttcccgttttttatcgcacatgaatatcatcgtttttatgaattgttggaaaaaggccagctctttggcgcattttttgaaatgaaggatgtgctggaagtccttcttaagttcccgatacttgttggtacggcttatatccaaagcaaaagggagccagaggaaggaaagcgctgtcttgaggcattgattgcacatccgttgagtcttggccagtgggcagcttatgggaatgatctgcgcaaaatcctgcagaaggatgaggcggcaaaaccgctttatcaggtactgagaagtattttgcagttatataatcgcaccggtgttgtgaactggcgtaatacaaggatcggtcacggtgctgtggccggagatattatgcagtacgcagaagatttcaaaaagtattcgacagccatcaacaaacattgcatggaaacggaaagtttttatacagaattgaacatcatgctgggtggaaaaaagctgaaagggtattcgctccctaaatgggacgaaataacggtgtgcagttttgaaggacagacgctggaggcatcctttagtcagttgatctttgatctgcgtccatacatatttgttcaggaaggagacatatatttctttgatagtatgaattcctggcgtcttgtgatagatgccctggattatgtgaagggaagaaaaattgtcgtgcagtcagagttcttcttaaaaaaatatcgcgaattaacaggagaagggaaatatttgccggaaaattcggtttcagatgttgttttttcatcagataatcaatatctgaacgagctgaatcttgcggagaatttcacatcgatggataatctggatgagtggctggcgcattgcctgaatgattatgaccgcggcgtctttatgttgaagatggaacgaggcatggggaaaaccgcttttgtcagcagcattgatcagttgattcatggtgatgacagccgggacgaatggatggatgtggtggtacgctgttattattgtaaccgtctggaatttcgcagtaccaatgattttgtcgcagtctgcaatacggccttattttctaaaaacagagatgcacaaaagaatattgaaggcagtgagaaggagttgcgtacattgtcgttgacgggtaaaaatccggcacagcaaatgtcagattatctgggattttatcaggaaatttatgataaaatgcagtttaaggaaaaacttctgctggtgattgatggtctggatgagatcactgccgaccggattttggaaacgggacatacaatctttgactatattccggcaccgcagcagctggcagagaatgtctatatattattgacctgcagaaccggtgaggaggaaccgttgagtcagtttgtcagtcaaaggatagaacatttaagtttgacagaaagctatactgtggacagaaaaagcacagagcacgaggagaatcttcaaagatatctgaaaaaaatactgccttccacagcgtatgatcaggcagaggcgattatcaaccggacaggcagaaattatgttggcttgaagctgtttgtcagtctgatggggatggagatcagcgtcagagatttgttggaaatggacaatgaatatagactcagtttatttcttcagaagcttcaggtgatttatggtgaaaaagtgtttaaaaagacaatacagtttctgacattgattgttaatgcgtatacaccgctttctctgagtcagattacttttctgatgggatacagagaaatgccaatggaaatgttgacgattatgtatgaactggggtgtctgctcgatttgaaacgcacagaaatcggcacaaaaatccgtttggccaatgagacattcagacagcatttgcgggaaaattatgcggatgtgatgcaggcacaattgtcggactggattcaaatgatacttgtacagggcagcaaggaactggataatggtgcttcagcagatttatataagaatgaaggggccatttacctgtatggcaatatcatgaagtatgtggaagaatgggctgcagaagcacaaaaagcggttgtatatacgaatgcttttgccggtgccatttatcagtttgaaggaaaagtagacggcaggaatcatggttatcagggggtccttctggatatcggcatgacctccggtgcgattcaaatctatgggcgtctggaaacagacaagcagaaagtggattggttgaattatgcgtattgctataataacagagcttatcataagggaattactttatccgatgcagagggtggagaaagggatttggctcgggcttatgagattgtatccggcatgccggagagggatgcaaaagttttgtcggccatgggtactttttccaataatatggcagctttgatgagcaaatggcactacccattagcggaggcttctgtgtggagccatcgttctatagaggcaagaagacagttgatgtatctggattttgcggaaaatgcggaaaattatatgcagtcgttgttgaattatgcaggacttttatgtaaatatggagcaatggacgaattagcgtctctgtatcaggaaatcaataccatctgtgatgaaatcaacgcacaatatccggatgcatatggaatgttgcggccaaagggcaatcgtgtgaattttggttatgtatttcaaagggcaagtatgcggacgaaatatgcacaaagccttgctgagaaagggaagacaatggcaggtgatagcgattgctatgaaaaggcagcaggactttatgaggagagtctgacagagttgagagaacttctggcatttacaggcggcgaacaaatggcagtccatgaagcgttgtataaagcctgtttttatcttggcagaatatatgtccttctggagcagcaggaaaaggccgatgcctgctggaatgagtcttttatgcatattcataaactgaaaagccgcggtaagttataccaaaatggtgttttagaggaaatcaaagggatgtttcctgaagcggtgcaatgataaggtcgttttgacaacaggagaacaggagggatgaagaaatgagcagcaataaaatggatgaacaggaagaaagatggggaaagcgcaataaggaaaaagctgagattcagcaactgtatgaattcaatgagaagcactttgatcagggcagtgaagcgtacggtcaattgatagcagcggtggaaaactattcatcaaaggctatctgggcggttttgaataactcaccatacaataccagagaggactacgaagatgtaattatgcggggacgtgagagttttctgcaggaaaacaacaatgttttctttaattataaaaacaaggaagatgtccggaagacagtgatgttttcggattatgcccggggaatgtatcagaaaaaagcatttgatcatattaagaaacgcaaaagaaacagtgaagtagatcctgtgcctgaggatatttatatcgaaaacggatataacaatcagataccaagtgccggagaagtgctgattgattattatgcaaaggcagtgatgaattcagacgccaatccgtttcatattattttcctgtgctactcgaaaatgctgccggttgtgctgggagaaactcgatgcaattctgcggatggatgggcctgggagcatatgcagggaaagacgatgttccgactatcggatctttttgtcagaatgtttaattcggctgttcggatgattcgtgtgactttcggaaagccgtattgcgataaactggaaaagccttttaaggatgataaaaccggccagttatatgaaaaactgggtgaggtgatactgaccagtctgtatgagcagagcaacaccaaaaactgggtggccagattaaataagaaaatcatggtaaaagtcgtttctgagattatgaatgcagcagattcggatgaagatgcgaagcgtgcagcgacagaggcaatcgcctatacaattgggagataaggaggcatatcatgttagatcagcaggtattggaagagatatatacaattgcggaaaaggttggagcccatcaggtactgacagaacgggaacaggcgatgtatgatgacattttggaagatgccggatattatcaggtgttctgtctttatacagccatgattgattttccgactttttacgaacagtctgtttccgaagagaaacagaaggtgaaagagtggcagagtgaaaaaatccgggagatagaaaagcataaaaattaaataagtcgtatcatacagaaaaaaatcgacagtcgtcaaaaactgtcgatttttttgttcaaaaaacaggtataaaatgcgtagcattttggaggttagctctgaacagttacattaatttaacgtttattcgaaaatgaacgatattgggacgaagtcgtgagggaaaaagatgtatagtgatgatatagattaaaaaaggcttaaatttaaaaaaataaaaacgaggagtcatgttatgaaaaaatcagggaacaaaaatattctttgtgcagtgtggggcatcttgtgtgcggcgacagcttttttgggtggattcagtcatagtatgctgatcaactatgcctttctggcagttatgggcctgctcattttgattgtggacaggcacggactcagcaaaatctgccgcataacgaaggatttgaaggggattacagagactttttcagaggcagaagcgaaaggaacgcagggaaatgaagcctatctttctttgatggagagcatgcactttacatacccggaaacagaaggagactggatgcggcttcaggagagctggaagagttcagacgggatggattgcgatgtggaggactatatttttgagagtgaacttctggaatcctgtaattacaatgtgtgtacgcaggtggccggtattttgactgcattaggtattctgggaacttttctgggactggtattaggacttcgcagttttgatttttccaatgcagatcagatgacatcttctgttgaagcactggtaggcggtctgaatgtggctttctatacatcaatttatggtgttaccttatctattctttataatatcattttcagaagaatcacaacaggactgacacaggagctgaatcatttttatgatgctttcaatagtgccttagaaccggtttcacagaaagcgatggccgaacgtatggacagccgtcaggcagagaacaatgcattgatgcaggaaatcaaagaacttctggatgagcgcctcggtgaacgtctggggtatcagatggcagagacattgacaccggtatttgacaggatcattcagtccctggattccatgatgctggattttcataaggaacaggccaattccctggagaagattgtagatgcttttgttgacaggatgggtggtgccctgaacagtcatgtgaaggcactgggtgaaagtgtcgatgagttaagccaggcgcagaagacaatgagtgttgagctgcagcggctgattaagcagattgtcaagacaagtaaggatacttctcagatcaatgaacatgccggtattattctggaacagttgagcggttatattccgcttctgacgcaaacttcccaggattctgcaaaagtgattgaaaatatgacccagtggtcggaagatgttcagaaaatgacggatacccagcagaaggtgatgaaggaaatggccgttgaacagaatgaacttctaaaaaccatggcggaacatgaagcacatctggatcagacatgtgaacagatcaatcttaatcagcagcaattgagtgacagcctgactgaatttacaaaggcagctcaaatcatcgctgagcgcgaagaggatccgcttcagcttgatggtatcaaggatatgctgtccggttatatgaccactatgcagaaacttcagcaggaaagtgcacagaatattgaaaatatccagagtgcaggtaccggcaaaatccaactgtcgtcaaaagggctgcagcaggatgaggaaaaatggagcaaagtattgaatgagaagatggatgcctggatcagagagcagaaagctttccaggaaagactgcttcagctggaagaagagagaagtcagccattttggtccagatggggaagaaagtagtcagagaatcctgtaaaatgtaagtgagatcgtgcacctggatataagaggagagagtaaaagacaactatgcggagaagagatcatgtaaaaaaggaagagaatgtcagttactggcagagttattcagatatgatggcagcacttctgttgatttttgtactggtcatcgcagtggccatcgtggcattgaatgattacaaggaaaaactggcagaacagaatgaagaactgctggccagacaggaccttcttgaaaagcaggcagatgagtatttgaaattaaaggaggaactggaggagaaacaggcagaaatcgacaagattatcggtgttaagcaggagattatagaggcattgaatcaggaattttcaaaagaggagattgccatcaatatcgatcagcagacaggagccattgtttttgatgccagtattttatatgaccgaagtaaatccgaattaaagggcgaaggcattcaatttctggatcgtttcctaccgatttatataggtgttttgttcagcagtgaatttaaagatgatatcgctgagattattattgaaggccatacagacacggattccggctatatgtataatctggggctcagtcaggacagggcattatctgttgtggagtattgtctttctgacagcagcctgagcaaagagcagaaagaacaactgcgttcagtcattacagcaaatggacgctctttcagtaatccggtttatgatgcggacggtaaagtgaatctgacgaaatccagacgtgtggaggtcaaattcagactcaaagatgaagaaatgattcaggaactgcagggtatcctggaaaggggagatacacaatgagtgctaaacggaagatgagtgaatgggtgaaaaattataaagagctgctcttatttctgctgttcagtttgttctgtgcttttgaggcagccggaaagggggctctaaacgagtttggcaatattgaattctggctgatgttgtctgccattgtcctgcttgtggctgcagagcagctgggggctaataagagatttctgatggccgtatttatgttggcaacggtgggtaatctgatccatgcctgtcaggaagtctattattatcatgcagatgaactcagggaagccgggcaggcgataaagatggattataagtctgtaaatacggattatattcttggctttctggcaattttggccgtcctggtgatttatccgcgttttcataagatactcagcaatgattttgccgtttttggtatggttgtactaacatttgctatttatggattgctgttggtggccggtcagtctgttggcggtgtcagagcatggtttcatggcattcagctgacagaatttgtcaaaattctctttgtctttgtcattgcaggtctgttgagcaaacagcagatgagcaggagacaaagcttcatacgcgccggtctggctgttttgtatatgtgcggaaatattgtgtgcctggggattatttccgagttcggtacgctgattgtgatgggcattgtttttctgattttcctgtttatttttccaaataagttatggtggctcggcggtgtcctgttggcaggggcaacggctataattgttcttttatctgttggttccggcatttaccaggaagctttggcgaaagcaccggcagcatcatttaccaaaatgtttgctggtgagctgaaagaagtgacagatgatgagggcaatcgtgtctccggtgttgaaatgacacgtcagttggcagaaaaagttctggaagatatgaataatgctgagaaagcgtcgtttgaagaagccagtgggcaactgaaaggtgataaggtgccggaggaggtattgacagtactggtaggaaattcggatttccgaagtgcctacttacagactttttgccacgatgatttctggggcaatacagcggaaacattatatgatgagacaggtcatggccttgtccataaggtgaaaggggctgttctgagtttatacaataaatgtgtgcagcgttttgttcttccgatgcttccaaaggatctgcaggagaaatttctgggtgtcagagacatgaataagacagatgctgtttatcagaccaatcaggcgtccagagccatgcagattggcggtttgattggttcgggcagtcatgaatttatgtatatcgccgttatggaatctgatatgattttcgcgtcgatggtcagcttctttggatttgctatgggattttttgtgattctgttgaatatgattttgcttcgtgagggaacccgtattcagagaagtcttgagacgacatcttttcatcatggggtggccatgggcctgacgctgatgttatttgtgcaggcgatgtttattatcggcggcaatctgggggtttttccgttaacaggtattactttgccatttattgcggtgggtacgacttctatgctggtttgttttgctatggtcgggcttttgatgactgtttcttttatcaatgtgacggagcagaacagacaggcggataataaatttaaaacaatatgctttatgatctgcggtatgttgaaaaagacagttcgcaacaccggcaggggattgggcaaaggcgccggaaaaatgtataaaattgtaaaagctgatctggataaagctgattttgatgacagtattgaagaagaggatgatactgtggaagcggatgatgatacatgggaagctgatgatgaaattgaagctgacgatgatatcgaagaagacgatgatatcgaagctgacgatgatatcgaagctgacgatgagattgaagaagatgatgataccgtgaaagttgatgataatagtgagacagcagatacaagcatgagcgaagcaattatgaaaaaaacggctaaagatgaaagagcccggatgcgtcgtggcagaaacagcggaaaaaatacgatttttgacgattgggatgacgaaggagaggatgaagatgttttataaattcagagtggagatgacctatgataagaaattaaactatattcgtcatttgaatgatctggataagatatggaaaataaaaattttcaatgacggggaagagacggtacgcgggcttcagattaaactgtcttttgtcccggactttgcggaatcatggatcggtcatatagatgagatcaaggcaggtgaacgtgcagatatcaatgaaccgaatctggtaattaatcctgaaaaactgctgagctacaatgagaaactggaaggcaatattatcgtggaactgatgccggcggatggtcagagtgaggccgtttacaaagaggcgtttccattaacagtgctgccctatgaccagtggttgtccaatgatcatccggaactgcttgcaacttttgtgacaccaaatgaccgaagagtattggaaattcttgcaaaggcaggcaagcgcctgggcgttcaggaggggattgcattcagcggatatggcagtaaacaggaagtgctgcgtcagatgcaggtcatttttgaagtcattcaggaagaacagatcagttactgttatccgccggctaactgggatcgtggccagcgtgtacgtatgccgggatttacattggcgaataagctgggatgctgcattgatatggctgttttgtatgcgtcctgtctggaagcagccagtctgaatcccctggtgatgatcctgcatggacatgcagttgcgggatgctggctgaaagatgcttcctttgaaaagactgttattgatgaccgggccagtgtagaaagccgttcttacaataaactgggagaactggccatggtggaatgtacactgatggacaactatgccggcaatacatcctttacatcggcgatgaattgtacggataaacactttgccagatttgaatatgtggtggatattaagcgggcccgacagggcggtatccggccgatgccgctgaaagaaattcatgatgatatgtctgaggaaaatggtggaaaactgccggggcagggaacagaagcggtggatagtgatgctttttatgaagaggatgatctggatattcttcctgaagaagatcatacaatgacgaagatggattattgggaacgcaagattctggatatgacacttcgaaacactttgctgagtacttcctttaaaggtaaacagctgccggtgatgggaacgatgcctcagatggctgctttgacagcaggtcttcaggagggcagatgcttccgaattcttgaagcaccggatgaactggcattgaaaagaaaacaggtgacagagccggatgaacagaaccggttgagtcagcagtttcaatctctgacagacggtgaactgcacagcggacgtattcgtgtatttttgaatcgggagacctatgcttcctatgtgaaatatttatatcgtcaggcccatacctttatggaagaaagcggcgcaaatgttctgtatctggcggttggttttctgaaatggcgtcataaagatgaaacggcggaccgttatgcaccactggtattgattccggtgtcccttgagcgtgggcgtgcggatacggattatacattgactatccgggatgatgagtggcagatgaatattacactgtttgagatgctcaaacagaaatatggcatcgatttgacgcatctggatacggtgccgatggatgatgaaggaaaaacagtgtataaggctctgtttaagacagtacgggaagcaataaaactgaaaaagggctgggatgtggaagagagagccatgatcggcatcttttcctttggacagtatatgctgtggaaggatttgcatgaccatggtgatcaatttgcagcgcagccattggtgggcagtttgatgaatggtcatctgttgtggaaaccggagcatgtttttatgagcagggcacagcttgacagggaaattcgaccggacgagctggtgacaccggtcagcgcagatggctctcagttgactgctattgaagcagcctcccggggagaaagctttgtgatgcatggaccgcccggaaccggcaaatcccagacgattaccaatatgattgccaatgccctttatcaggggaaaacggtattgtttcttgccaagaaaatgccggcgttggaagttgttcagagtcggctccaggacatcggacttggaccgttttgtctggaactgcatgccaaaaaagccagcaaatcgcatgtgctgaatcagtttgcaaagacactgaaactggcggatgagaaaaatgtgccgttgtatgcacggactgcagatcagttgatggagaaacgcaaaatgatccggacattgattgagagactgcatatccctgcaaagtgtggcaaatcgctgtatgagttaatgagaattcttgaaaaatatcaggatgcaccggacagcgttcattttgatattccgacggcaatgcttgcatcggaggaagacctggcggactgggaacggcaattggaaattctgaaacataccgtggcttctcttggtacaattccgtctcagcatccgctgcagcagattcgtacaaaagaatttaaacggcatgagaaacagcagctgcgtcaggaaatgcagcagtggttcagttgtatggcgcatcttcgcgaagatgtggccggcatgaagcagaaggttgggattgctgactgtgacaccgtgaacttcaaagtgtatatttcactggcagatattttgtctcatgcagtgatctatccggaatatatggcagaacttctggataaagatcattcttttgaagatattgagcaggcatatgagaagactgcggctatacaggaagttttgagaaccgttgacagtctttacgacagggaaattttctctgaggatttggcgtatgagaagaaaaaactgcagatagccggaaatggcgatggtagattggcgcgtatgcagcgctcaggtgttttgagaatgttgaggaaatatgccaaagacccggaacaggttacagcggagaatttgcctgaacagttggaacagcttatggcattgcaggaacagtatcatgatgtgggtaaattatctgcacttgaaacggaagtgttgaaaaacggaagtaaaattgacttgacattgtggcagaaagccgacagaagaatgaagctggtgatggatcggttggatacactggccattgatgaagaaagttacggtattttgcagaactatattgaagaggaagcattggctccggatgagacatttcgttcagaccgtttgttttataaaaaaattgccaatcagtatctgggtttgaaacagtgtacagaaaatatcatgcagatggcagactatgatcatgacggtcggaaagacaatatttcagaaattatgctcagtgatgcatgggaaggaatgcttaaaaactggcaggccaattaccaggatttggatgcatggtgcagctatcgaaaagaaagccggcaggcgcaggccatgggcctgtctgcggttgtggcagccattgaacaggggctgcaggcagaagagatgattcctgctttttataaggggtgggcaggcacttacgtgaaacggacgattgaaaaagagccgcagcttcagtatttcagcggtcttgcttatgaacagatcatcgagaagtaccgtaaactcagcgaggattttgagaaaatgagccgtcaggaaatccgtgcaagattactggagcggctgccggaccgcatggatggcagcgattccaaagacctgagtattcttaagaaagccattatgggtgccgggtcaaaaatggcgattcgacagctcttctccaaaatgcctgaggctgtacaactgctggcaccgtgtatgcttatgagtccggcttctgtggctcagtttattgctccggattttccaaagtttgatctggtgatcatggatgaagcttcccagcttccgacctgtgaagcggtgggcgccattgccagaggaaaaagtgtggttattgccggggatgaacagcagatgccgccgaccaattttttcaaaaagaaaagtgccggagaggatattgaaatggatgatctggagagcattcttgacgatgcattggcgctgaatatgccgcagtgttatctgagctggcattaccgctcagcccatgagagcctgatcacgttttccaatacccattattatgacagtgaactcagaacatttccgtcggtggatgcatctgtttcagctgttcagtttatcaatgtaggtggtatttatgatcgtgccgggacaagaaccaatgaagcagaggcaaaagctgttgtggatgaacttgagcggcgtatcatggccggaaaagctcagtccatcggtgtgatgaccttgaatattcagcagagaggattgatcaatgatcggctgcaggaaagaatggaccagaatccggccttccatgaagcagtttccgggatgaatccgccattgttcatcaaaaatcttgaaaatattcagggtgatgagcgggatgtgattattttttcccttggttacggaccggatgaagaggggcatatgagcatgaatttcggaccggtgaatcaggaaggcggacacagacgtctgaatgtggcagtgacaagagccagacaggaactgttggtttatacatcctttgaaccatctgccatgcggacaacagagcacagtgccagagggttgagagatttgaaagcttttcttgagtatgccaagcagggggcggcagttttggattgtcaacctggttcggcatcgaaggaaaaagaaacaattaatcgacaaattgcagaaaaattgagggaaaaaggctggaaagcagatataaatattggaacaggaaaattccggattgatgtggcggtgcatcatccggagaaaacagacgaatattgtctgggaattatgtttgatgatgatgcctctgcacttcaggatactgtgcgggacagaaatcttctgcagaagaatgttctgcagagaatgggatggaacattctgaatttgtggctgctggattggtatgaggacagcgagacgcagattcagcgtattgaagatacgctgaagaatatgacaggataatgacaggaggaaaagatggaacagtgggtttttgtgctccccggggcagacgatcagtcagaatgtactttttttgcgaacccctccattgccggttatcatgtagacgacggcacagatattcagctcacagtaactttcagagatgagaaaggggaccatgtatatgatgtcgtgctgacaaaaacagctcggaaaaactggtatgccagtgagacgtatgacattgcagcaagagcatggaagaaagactataaagtccaggcggagataactcaaaaagatggaacagcggaaactgaagaactgtcaagtgaggaagtaacagctgcatggccgacattcaaagaaaaaacagtgaaacttgaaaaagacagcgatgggcaactgcagaaagagatttcgctgaatcagtggattcaggaggaaatgaccagtccactgtttgagtataaagtagaagaccaagcgggatgtgagattattctggatacacagaaacagtgcgtgagcataaacagtgctgaatcaaagggagaatttacccttgcgattgtagatccggcgggaaatgaggaggttacagaaatgagtatcatagcggcagcaggaacggagaaaggactgggcatcggaattgtcgcattggcagtaattgttgttgcggtgattgctgtgctgcttcttaaaaagaagacaggttcagtcggagcaacagccaaaacaacaaaaattttggcggcgcgtgaagaagtggacaaatattgcaagcgtctggaacttctgacaagaaaaacagagaataccatgcatgagatacgaatggccgcacaggcagcagaagaacgcatccgccaggatggagaagccagtgcctatgatgtcgatgatatccggacaatgacagaggaagctgagaacctgtttaaggagccgtgctgtgaaaatattcatacgatgcgggtgatcatgggtgcagtcagtcagaatctgttgaaaatgcagggaaacgccagtattaaagtggatagcggcagtcacaatggcatggagaaccccaaaaattatctggaccctgccaaaagacaggatatcctgtcaaaaattgaagtggatgccgtcagtgttgaaaatctttgcgctgaaatgagtacaattctgaatacattgaaggaaattgcttatcgggaagaagtgccttttgaaaaagatatcagtatcacagtgacagacggacatggagaatatgagacgcgaagagcctgtaaagaagcctatggtgcaatggcctccggtgttttttcactggatacgctgaaattcctgtcaaaaaatgaggtctggatgacactgccggaaattatcgggcagaaaacggatattcgtatttttgctattgatgacaatcggatgcgggcaatcgcagaaaagccgatattaatctggcagggaaaaaatcagcgcattttggaatttacatatgatgaagacgtggttttcagactgcgggatcatgcttatgcagaaatcaaactgcattttgaaagatagagacagaggaggagatggacatgtcgtgctgttgcccgtattgtatgagtgaactggatataaacaaaataaaatattatgtaaaggttgaaaatgagcccagtcagccgaaactgaaagcatttttggcagtgaatagagaagatcgtcatttttacaatttctggtcacggtataataggaaactttctccggaaacactggagaagcgaattgtgaaatctctggaggaaatggagaatgagcgggccagactggcagcggatgcagagcagtatgagcggagaatggctgcaaagaaccattccggggagaatgatgaggaaattcgtccgggccagggcattgataatacgctgagtgatgtgccatctgatcattttgttgtatgtgagattatcaaagaaatgaagaatcgcaaaccgacacagtttacaatcagggaagatggtcaacgcattgccattacctatccggtgtgccctagctgctataaccgtattcctgaagaaatatttgaactgccgttaattaaaattgcactggcagccagtaagtccggcggaaaaacctgtatggctttatcctggttcagaacattgaatgatgctaggggcaaaggtttgaacagtcatgtgagtcagatggattttatttccatgctgcaggatcatctgggcatggaggatgatttcgggaaaatgctccagaaatttaatcgggaaaatatctgtccgggcggtacgcataaacagtttattccaccgattttcctgaaaatgaactggcacggcaaacaggagcggcaggcactggttggtatttatgatgcggcaggagaagttatcacagaatctcagcgggatgcagagcttgtttattacatgaagtatatggacggtgtcatttatatgatagaaccggatagaaccgggttgaaaaaaggactcacgaatcagtatttgtgcatacgcaatgaggatattgatgcctattatgaaagggcaagaatgctttccgtggaggaacagagcagcgtgcaggccagaaactttaaaaaggaaacgctggcacagattatgaatgtccgggatggggatatgaagacattccgtgaaaattcagccatggaagtgctgacagcattgcgttcttatgtggaagatatgaaacttcagcagatgcatgtggcgctggcaatttccaaatgcgatgaattgcgcagcaaccgtgagattgcagaatacaacaaaggcaatttgttttttatggatgaggaaaaggtggacaataatctgcggaatatgagaaaccttgccattcgtaaattatttgaagagaagatatttaatatgcagatttttgacaatgtctttaaatcctgttctcttcatatgattgcagcccttggatgtccggcggaagtacctgctgacagtgagaaaaaaggtgattgggaggaaagccgtgaatccagattaaccggagatttcaatccgatacgtgtggaagagccattgctggaactgatcttcagatatgcggaggaacatggatggaacgaataatacattttgagcagttttattatacgaactatggccagggaatgcgttttgaaggcaatagtacagaaacagcccggacggcatccgcactggagctactggctgcaaactggatgaagcaggaactgaatgagccggtagaaatggtattatataatagtcatctggggtgctatgtgtccgcaatgaccgtaccgtgtacacagacaggagatgccagaacaagttactggatacatgctgtgatgcctgatgaaaaagaaagtgatggatttatggactgcctgtcatggccgctgcaggattatgtgacagaagttcatttggcacagcatctgtcaccggtgactgttagaacagaaacctgtgatttgtctgcgatttgccggaaataccatttgacaggtgaacgcctgacacagtttttatatcaggtactgcagaatgtctgtgatagttcagcgccttcgtgtctatgttttgttatgggggaagaagaggaggattataatgcagcagccagagaaatcatggctgttgtgtatcatcttttgccaaagccttatagaaagaaggcagattatcttgcaaaagccggaaaggatatggagaatgtccgtttctattttcgaacttcctcacatcaatcctggcaatttgatatggatacggcacatccgtggataaggtcggagctgccggaagaagaaaccgtatttctgaaccggatgacggaattattccggcagaatccggctgaatacgaacagatgatggaacaattgtgtcggcaggagacagacgattatgatgcgattgtttggaattattatacatactgcctccgggaaggagagatgcttccgttctcgcaggaaacattgttgagaatccagccatttctggaagaaagactgaagcaggatgagggctgccggcagttgctctgtcagtgcatgcatcagattaacacaaaagataaaaccagaacctttgtccagacactgatggaaaaatatatttcggcagcggccggcttgccgcaaagcggcagcagcggttataagcagagcctggagagaaactggcagttaatggatcagctcagtgcaggtaagacaaaaattgtggcttcttatctgaagtggatgaaagacatttcaatactgtattatcaggatttcgttgaatatggttcaaaagagggccgggactggctgatggatatgcagtttgcagatgaagcgccgccgtgctgtcaggaattactgaagatggatgtccgacaaatgaatgcacagaggggtcatcaatgggtgaatgccatggcacaatgcattcaaacagatatcaatcttcaaaattcatcggcagcagcgaaagcaatctggaattatctgatcaggctggtggaatttatggtaccggatcccgatgccggtggggatgtcggccaaatgctggaaacaacgattcagatgcagcagttgcttcaatttatctggaaacatcgttcgatatttgatgtgacagaacgtgtagaaatctgtggtgtagccaaggcgtatggcggttcggtttttgatgttttcagcagggatttctggcgggaagtccggacagaggattttgagacactgtatgaaaagaaaggcattaccaagctgtttgccaattgcccatatgatgcctatcatgattatcgtcgatatgttgggcgcagacacaaggaagaaaaaacaggcaaatcacacagtcagacgctgccggagaaatccggaaatatttctgataagttatcggagaaagaaagcagcccatctgaaatagatacgcagaatcttcccgggatgatgaatcaatgggtgccggatgcgttggctgattatggattgtggggtctggcaatgggaacaggtttcctggcgggactggtatttgtctggtttgccggttatagtgtcgtgacgctgattgtggttattctggtgattctgttgacagcggcggcaggcattgtgtattttaaatgcaaaaaatagagaacaggggaggatgttatggatttttttacagatctgatggggttgattctgctgattgtatgtattctgattgtcctgatatttttgaaagattatatacggttgggcgggaaaaagacaactgttaataagaagcagaagatgattgtttacgaagtacatcaaaataataaacggattcaacaggggtggattacggatgatcaactgcctttccaatttggaagaaatgccggcagcggcaatgatgttgtggttgttccggagggaacaccggctgatgaagcggccagtgtcagcagagcatggttttatattcagaaagatgctctgggcaattacatggtgtatagtgcagaattgtccggtgatggtaaaaagagacagtcagagaagaaaaaactggtggttgagaacggcaatacctggaaagcaatgtatactgtaaagctgcagtcagaagtccgattaaaagcagatcagttccaggttattctcgatgtggagaatcccggtgagtcgtaaaatggaggagtacaatgatcaggaaactgataaaatttctaaagaaatgttggggaaagaaggcagcttatgcttatgcaggcctgatgctgacagcctgcattctgacctataagctgtactttgcgtccgaaagcaatatttttaaatcggaagaagaaaaagcttcggttgccagcagtgtggcagaaggtaaaatagcatatggagaaaaaaatattattcagggcgatatcacggatcgaaacgatacggtcatcatgacttccgattctgtagatggttatgcacattataaagatgcggaagcttatacccaggccatcggctttgcatctaaagatgccagctatcttctgggaaaaacgagtaaggcatggttatatgatgcgcttccgggtacaaataaaggatgtacgattcagacaacattggattcggatcttcaggaatattgttacagtaagctgaaaaatgtgtgtacgggcaatggcgccggggatgaaggctctattgttgttctggaagcaaagacaggacgtgtgctgacatgggcctatacaccgtcctttgatgtgacggagcttctgacagcttatgcggcggcaaatcataacacaacaacctgggaaaacattgtggagaatacccttcacagtgagacttatccgatgcttcatccgcgtatgccgggcagtgtatttaagattctgaccagtattggtattattgagaaaggcgaaagctgtctgagtgagacggtatatgacggtacaggttatctgcagctggagaacagtgtgcttccgaatgcaggcggacaggtctatggtgagattggattcaaacaggcctttatggattctgtcaatgtttattttgcgaagaaagccattgaagatgtcggaaaagacaggatggatgaactggcggaaagatgcagtatcggcacaccgcagtactttgactttggaatgatgctttcaaaatatgactttaataataatgatgaagaactggccaggacagccatcgggcagcaaaatgtccagatgagtgccatgcatgtggcgatgttgaccatgggagctgcctgtgacggacagattgcaaagccacatatgattcagcaggtttacagaaccaaggagaaaaaaactgcagagggaagcacatacagcaaaggtgaaattgttcaggaagagaaaatagacaccggttatatgcatattatgagcccggagacatccgaggttattcgagacgccatggaaggcaaaggtgaggcgctgaagcaggaatccgggttgaatcttgttgtgaatggtcaaagtatcggcattgggtgcaaaaccggtacaggccagattgacggttctttcggcggttacagcggttataacaatatctggctgacgtcttacgtaccggcagatgatccgcagtatattattgttctgaataaatataaggtggacggcagcggcacatccagttatggtgcgacgatgtttgaggatctgatcgatgtctgcaatagaatttataataacaatcatcttaatccgacggacaatgccgatgaaacagagacagatgagagtgatgcatcagcaaaagaggaggcagcagcgcatgtttaaaaagggagacgttatcaatgcaattccgccgaaggaatatggagaatggtcctgcctgatgtttacagaagatgcgaagccggtacatggcaatccgctgaaatatatgggaaaagcccgtccggtttgtcaggcttatcaagatgagccggagcttggcagaaatctgttttgccattcctgcagacatcagtgtccgcagagagaatacatggtgaaatatgtggggcgctttgaaccgcaggaggcgcagccccagacagcggcaaagatggttgaaaaaaccacaaaacacagcggcgcagaaggtgaaacacataatggtgatcttgagacgctgatgagtcagagaaaaaccaaaaaacaggtttatgatggcagtacggtcactgagaaaaagaaaacatcctcaacagaaagtaagaaagcagagagggatttgcagcgcgagcagacgttgctgcagcagcaggcagcagtcaatattgtttctccttttttgatgcagaccattacttccggagaggctatatgcggcaaagtacctgtgttttttgttgtactggaattggtggaaggccaggagttgggtgagtatatagccgccatccacaatctgtccgacagaagtgataccagttggcgctgcctggacctgatccgtcagctgcttctggccatcagggcctatgcgaaaccttataacaacaggtattatgtccatcgtgatctcaagccgtccaatatgatggtgaaaatagaatgggagaacggtatgcctttccagcagttgaaaatcattgattttgatatgctggttgcgcagaatcatatccgggaagataatgtgtacctgggcggaacgccgggttatgtgcatccggaggcttatcgacttaaaaatcttccgaaagatacaaaacgtcagttcagtcatcaatgggatctttatgcagcaggcctgattatatatgaaatcatggagggacatccatatttcaaagacgacagttatctgtctgatccggagaaagcctttgtattggatatgggtgaaaaatcggagacagcactggagtatcctgaactggtggaaatcatgcgcaaactgctcactaatacggcagagggttacaccgatatcgatcaggtcattgaagactatcagcagtttctggaagctgtagacacacagtggtacagagattactttttaagaaactggctggagtgcgggcatgattttgataaaggtctggctttttgcaaagtatattgccatatcagcagtgaaggcctgaaagatgtccgtcaaaatttttgtgtgaatgccaattcagcagttccgctggtttatggtaaaaatatcatgggtgcagattgtttatccggcagtcagatggtgcagaaggaaattggcgctttttattatattattcgaccggatggccattgtgttctgcaatttatgcctttgaatgaaaactgcagggtgcgcggggcatcaggaaacaatctggaagaaggaacggaaatctatgatgcagatgtcaaaattgtgattgacagaattgaataatcagattttgaaaggaagaatggacgatgagagaggaaaaatggggaacagaaccaatcagaggaccgcaaagacctatgggccggccggtacggagaggcggacgtcccggagcggataccaatccgatatttaacccgggaggcggtattcgaccatctggaaaaagtcatcgcaatgtcaaaatcggtctgcagaatgacacaaccatcgattttgtatttgattatacatcctctgcgaaaaatattttgccggtcatttacatattctgcagggatgtgatgcaggcctgtcagtctggaacagggcgtgtccgctttggtgtgacttttttgtcggatgaggcggaaagtaagcagtggaagaataaagattttacatcggtatcaacagatgtattggatgcaatgctgacacatgaggtgagcggcggcggtgtagacagttatgagtgtctcggaacagcagtcagaatgtctctggagaagctgtctgcagtgccggcgggagaaagagttttaatgttgtttacggacagcagtcctacagacgaagatttagaacgtgtcttctgcagaaatgagacacccatcaggtcagcggtattatttgttccaacggcttattcgggcagtgaatacatgtttcgaatggtggatgcagatggaaaaacagaccgtgggaagacggcggttgtatttgatattgaagatgtcatcaaagaacggtatttgaagacagtaacagagaaaaacggcagacgggtcatggatgacaatcagttgttgaaaaaccaattgttgatggcccttgcataggaggaagtcatggaaaaagaaaaatcaaatatacaaaatctgtctgtgtgttattgcctgatgaagcgggaaagttcaaatcagacaggcactgtcagaatgtctccgatgacagaaatgctgaatcatgtgcaggctttttatgaaaataagggagcgtccgtatacagccaggcctttgtgtacggcaatcaaaatgcttttgcaagaccttttgagcagtatccttttggctttcgtgccgggttggatgaaaatgttgagaaatatgacctgacagagatgttagtgctctgctgcggacttttagaggattatttgccgggaagtgaggaaaatcggtgggaagaagagataaaggatgtataccgcctggttattatcagtgattatccgttgaatacagacagtgaagcagttgagcagttggtcaatcacataaaggcattgaagcgcaggtgcgattttaagattgtctatgtggatattgcaggcaatcagcagccgggcagcctggaggaagtcattgatttttatgattatgaagaggatacggcggtctgaaaggagtgcttatgggcgaaaaagaattcaatacaaatgaagtggaagaggagatgtctttgtccggccagttaagccgcagacgccgccagcggcgaatgacagaggagagtaattcttcggctgtcggtgcagatgaaaaaaatgccgacagcactggggatgcatcggagatggaaggtgtttctgatcaggatcatggtgctgaccggacagaacatgtgaaggccgagacgcaggaagataaaaaaatcagaattacgatgcttggcatttccggttcgggaaaaacttcgttcttatccggtgtgtatcagaccatgattatggatagttttcacggcttatcactggtgccgtccatcgattccggcaacagttatcagcagattggtcagattgcggatattgcgttaatcaaccgaaaagattttgattttgcagatggtacattggagacaacgattttcccgctgacactgcagaacagaggcaaggaaatctgccgctttgattttacagattatgcaggcggcgatgtcctgaatattctgaatgcccggggagatatgtcttccggcgctaaagccttgaaaaatcagcttcttggcagtgatgccgtgttggtttttgcagatgctacggtgttgtgtcagggaaaaaatgttgttgaatggcagcagatgaccggtgccacaaagattaatccgctgtttaacctgttaaaccgtgagatgggagatcgtccactgacggtattatttgtattgacaaaaacagatgatgagcgtattccgaaagaaatgaagcgcaataacttcgctgttttatcggagagagcggtgcagaccttcggaatgatttatcagatggtacagaatcatgtgcaggatggctggagttttggggtaatacctgtttcggcaattggcgaaggcaactatcgtctgaacagtacctgtgattccgagggtaaattgattatgcgacctgtaattaaagaggggcatgcacctcagccttacaatattgagacggcgcttgtctatgcggtggcctgtattttgtctcagtggaaagaagaggtgaatcgggaaaaagaaagcctgacccagcgtctcattgaagagggacgaaacaacacaattatcggtaatcttttttctcaatggaaaaagagaccccgtccggaagaaaaagtgacaggcattttaaatgaaattgaagagaagaacagagaaataatgacacttagtgagcagatgaatgaccttgtggagcaggccggcatcagacagcggattcaaagatatcgtgatcatttggatgaaagcggaggtatcagcggatgaaggtagatattttgcttcgaacacgggattatgacagggattatcgatggatttttaaaccggagtatgttgaccgggtgaccgaagacaagatgtcctttctgattcagatgatgcagaaatcagaattgaagcagtatctggagaatgaaagtctgtataatctttattatctctatgacgagaatggcagtgcgcttgtgcggagcggattttccggcagtatggacagacagggaagaaatatttatgcggtggaaggcattgcctgtccggctgaaatgaaccgccttttctggtatgcactgccgtatctggtggactggcttttacaacagcctatgctgcgtgagcaatggctgcgtgaaaatggtccggaagagaatgctgacgtggaacatcatatggaggtggaaggcctgaaagaagatatgatttttgagggcagcgccgaagaaaaccggatgtggcagtgcatgaaagatcacagcgcctgcatgcgcagactttatgcagatatttatcagtcggcagaaatgtacagttttatatacggcacgcgacctcaaagtttttatgaaggacaaacacttagatgttatacaccggaagcaataagcagtctggcgcctgttcaggaacaaaataaaatagtgatcccaaaacctgtcctcagggaagaagatcatctctacagagcggaaattcaaatcgagaagaaaaaccggcggtatgcggcgtatcttctggccagggatgggaccggtgaggccattgctgaaacagaggatatgacctttggcaatgatggcatcggtgtggctcagattgagagagcactgatcgcattggagcataaaattgccccattaggctacagtcgcggcagcaggagggtgaggacatgaaaatccggtatacgcctttttctgaaagaatggtgattgaccagccggtcaaaggaatggattttgcaaatgacatgattcaaatgtactttatgatgtcgctgcgttacagggagtgttattataagcagcggccacagggaaataccgtttattttatgaattatccggaggccagtctgcttttttattttgcagccggtatgcgttcctacagggtcaatggttttcggattgaaaaagaagagagaagaaaagcatggatttatatgctgcccctcattcagtctttgcgggcatacgattttgggagaaaagagggaacaaagcaattggaggatgattttctggatcatatgctggatatggaagaggtcctgtcaggagcattggtgccatttcatttcattctttcctctttaccgaaggaatgttttcctgtttgtccggaggtccggctttttaatcgttgtgcagttgaacatgctgaaaaaaattatttactggtaacaaaaaatgatatcaggcaggcagagatgccgacggcggtttataataaactttctgagattttctgggtgccgccggataacagacacaaaggatggatgtttgaatattacacaggcattatggaaaacgaaggcaggaaaagaaaaaactatcgggtgatccacaggccaactgatctgccggataaggatggacgctgtacctatggtcaattgtcgaaggaagtgatggcattgatggatgaaaatggatagacgaagccggatgaaaaacggcagttggaaacagccgataaaagcagatgaaagcagggaaggtttcgcttgacagagtgccctttttcggggtataatgaacaaacatgggctgaccatgtgctgaaatgtgttataaagcttccgtgcagccggggagatagcggtgccctgtacctgcaatccgctacagcaggggtgatgtttcagccgagggtctttgatttgtagagcagcccgctgtaagtagcgttgacgtttgggtctcgcgcaacgggaaccagtgaaccgtgtcaggtcaggaatggagcagcactaagctggaccttccgtgtgccgtgagggtgcctgggctgagccaactgcagcggtaacgtttatgggtcggattcgaagctaaacgcacggatttaatattttatagcgttatgaatgcctgtgagagcagacataagcgtttacagaagaataatgaatagacagttgaaggctgcagacattgagttgtttgcagctttttgtgtttttgtggaatgtatttggtgattgatcattgtattttgataaaaaatcaaaaagtccccataaaaaatggatttgaaatcgtatatgatgatagaaggcaacttaagtaatgaatttaacaaatcggatgattacaaaagaatggaatgtgtttgagctgaatgagatgaaggtgaggtggccgtgtgaataatcgggaatttgaccggtgtatgcgccgtatacaaaagggtgacaaaacgggtctgaaggaaatatacgaagcgtatatttcgtatatatatgcagtaattaggggtgttgtgaagaataaggagaatgctgaggacttgacagcggaattttttattaagctgtggaatatggcagatcagtataaggctgggagtggtcataagacatggatgactgtgattgccagaaatatggccattgattttatgagaaaagccggacgggaacagctgacagaagaagtatcggaggtatcagctgctgatacagccgcgggaatagctgattctatggaaaatgaagtggtcggaaggatgaatttcagagagacagtggagaaactgccggagacagagcggcagattatgacaatgaagctggcaggacagatgacatttaaagaaattgcggaagttttaggcattcctatgggaacagtgacatggaaatatcaaaacagtctggaaaagttaaggagggtcggcgtatgacagagaaagaagttgaaaaagcttacaagaaaatgacagaatccgatgcaccggacctgtgggcaaagattgagagcaatcttcctgagaaggaagtgcggactgagaagaaagtaaggacaggtttttttgcaaaacttgggaagatcttttccggcggcagtacatggaagacatcggcagcagtgtgtgcagtttgtatcattgtattaggtacagctcagggtgcaggcggtatgttcagagcaggcgcatctaatggaacggcttcggcagcatcaaaaagcagttatggcatggatgcttattcagtggacggagcagaagcttattcagcagagggtgatggtaaagaagctgcaccggccgactataacggcatgaattatgcggccgctgcagcgggtaccggagcggatgccgattcatcaggcggagctgtcgtgctcagtgagaatgaggcttcagcggcggtaggaactgaggctgcagaagcatcagcggatgaagcggggacggcagaaaatggcaaagaaatggcaaacagtgcagatacagaaaatggtcaaagcagccggaagctgattcgtacatttaatcttgacgcggagacaacagattttgacaatctggtggcacagctgcagcaggagacacagaatcttggcggatatgtggagagttcttatgtcaatggcaacagctattatacagagaacagtcgatatgcttctctgacactgcggattccaaaggataaaactaatgattttctcggaacggttggagaaatggccaatgtgacaagtaaatcggagaatgtggaggatgtaacgctgacttatacagatttgaagagtcatgtggaagcgcttcaggcagagcaggagcagctgatgaagctgatggagcaggcgaagacagtggaggataccatgagtatccagtcccgtttgacggatgtgcgttatgagctggaatcctatatgtctcagctgaaagtttatgataatcaggtggattacgacaccgtgaatatcagcattcaggaagtgaagaatgagacaccgaccggtgagctttctatcggacagaagatgctgaatggtcttgaaaacagtctgagagccattgcggagagtgcaaagaatctgtgcatctggtttgtggccagtataccgtactttgtgattttgtttgcagtgatatttgcggtggttagtattattaagaagatacgtaagaagaaataaatacgagaggtgctgtgtaggagtgccctcaaataaaaacgattgcgttgaatgaacagcagccggcaggtattggacgataaggtcagatcactgccggctgtttttacattttattggccttttcgtataaaaatgcattgacatttgcttttggatatatgatgataatagagaagcagatgagcacagttcagagtggaagacagagacaggagaagatttcactcagtaggaggctttcatgaaaaaagaaaaattagagacggataatgtatatgtatgctactgtatactgcgggaaatgcatccgggcaagcatcaggcagaacgtctgcgggaaataacagaagctctgtgggatgcacagactttttatgagaagatgggggctctgatgtttgggcaggcctttgtttatggcagcagagaggtcgttgtccgtccttttactgtttatgaagaggggttcagagaaacgccggaggagtttgcgactacttacagtatcagtggtacattactgcgttgttatgatttgctgaacgattttatgccgggagaagaggaagcgcaggaagaagcagagggattgaataacgagatgtacagattggtcctgatcagcgattatgcaccggaaggcaatagtcaggcactggaaatactcaccagaagttttaatgatctgaaaaaaaaatgtgattttaaggtctgctatgtgaatacagaggatgcacatcgggtgggaaatctgggtaagatgatcgatgtctgtggattggaataagcaggtaggagtgtcattgacggactgttttggcctgatagtagatgaagagaataggcagaggttgttaacagttaaatataaattataaaatatcgcttcactttataattgtgagattgagattattgataatactgaaaaatctgaacagcaggaacttgttgaagatctggttcagataatcacagtattcagttgcaaattacaaggaaaacgagcgaacaaagctaagaaacttatccgagaattgatgcagcaggaggaaacagatggtaaaagccataaaagtaatgttgataccaaacaacgtacagaaaactaagatgtttcagtacgcaggagcttctagatttgcttataactgggctttggccagggaaaaagaaagttacgaaaacggtggcagattcatttcagattcagaactcagaaaagaatttacaaagcttagacattctgatgaatacgcatggttattaaatatttcaaataatgtaaccaatgtgcattatgatccattttgtccatataatcagtcctttctatcctttcgactgattatagtataccacacttcgcgtcacagaacaagtgttctattttcttttttctgcaattcatctcccacctgtagaggaaggagaattcttgctaacttttgttaaatttatagaaattcccagtactacacgactgctcctagaaaatcgaagatttttacttatctctttctaggaatttcctgatgtaaatacctgtataggagttcggattctcagcgatttcttccggtgtaccgcaggcaacgattgttccgcctcttgcaccgccctcaggaccaacatctataatataatctgctgttttgatgacatccagattgtgctcaatgacaacgacggtgttaccgccttcagccagtcttctgaggatttctgtcagtttgtgaacatcggcaaaatgaagaccggttgtcggctcatccagaatgtaaatagtacgtcctgtgctgcgcttgctgagctctgttgccagtttgatgcgctgtgcctcaccgccggataatgtggtggatggctggcccagtttgatataggaaagtcccacgtcattcagcgtttccagttttcttcgaatagacggtacattttcaaagaacttcacagcttcttcaaccgtcatatccaacacttcataaatattcttgcctttgtatttcacttccagtgtttctctattgtaacgcttgccatggcaaacctcgcacggtacataaatatctgccaggaaatgcatctcaatcttgataataccgtcaccggcacaggcttcacaccttccacccttcacgttaaaactaaaacgtcctttcttgtaacctcgctctttggcatctacagatgatgcaaataaaccacggatcaagtcaaacacgccggtataagttgccggattagaacgcggtgtacgtccaatcggggactgatcaatattgatcaccttgtccagctgctccatccccataatatcatcatgcttgcccggatgaatggttcgcgcatgattcagatctctcgccagacgcttgtaaaggatttcattcactatggaactcttgcccgaaccggatacacctgtcacacaagtcatcactcccaatggaatatctacattaatatgcttcagattattctctgctgcaccgataatatgcaaaaatccagttggctgtcgtctctgcgatggcaccggaattcgaatgcggccgcttaaataagcgcccgtcacagacttctcgcatttcataatatcctgtgctgtaccttctgcaacaagatatccgccatgctcaccggctcccggaccaatatccacaatccagtccgcttccaacatcgtatcttcatcatgctcaacgacgatcagcgtattacctagatctctcagattcttcagggtcttcagcagcttatcattatctctctgatgcaggccgatacttggttcatccagaatgtaggccactccaacaagcccagatcctatctgtgttgccagtcgaatacgctgtgcttcaccaccggacagtgtcgctgttgctcttgagagcatcagataatccagaccaacatcaatcaaaaagccaagccttgccctgatttccttgatgacctgatcaccgatcaaatgctgctgtttcgtcaattccaaccggtccataaaggcattcagatcggtaatggacatctctgtcaactcactgatattcttgccgccgatcgtcacggccagcgattctttcttcaaacgtctgccgccgcactctttacacggggtaatagtcatgaaattctcatactcctgcttcgtcagctctgaaccggtttctctgtatcgtcgctccacattcttaatcaggccttcgaatgccatatcataaactccttcaccgcgctgaccgcgataatgaacacgtacttcccgtccaccggtaccatgaagaatcacatcttgaatttcctgtggataatccctgaagggtgtatccagatcaaaatgataagcctccgccaaagccacaagaatagcgtgagtaaaactggacgcatctgccgcagactgccatcccatcaccgcaatcgctccctgggaaatgctcaatgacgtatccggaatcatcaattccggtgaaaattccatcttataccccagaccatgacacaccggacatgcaccaaaaggattattaaatgaaaagcttctcggttcaatctcctcaaaactgatcccacagtccgggcaggaaaagctctgactgaaagtcatagattcttcctgatccggcaaatccacaactgccagtccctcggccagtttcagcgttgtctcgagagaatctgtcaaacgcttctcgatatcttcccgtaccatcagtcggtctacaacaatggaaatattgtgcttcttattcttctcaagcttaatctcttccgacaattcatactgatggccatccaccatcacacgcacatacccactcttccttgcctgatcaaaaatcttcacatgctcgccttttcggccccggacaaccggtgccaacagctggatcttcgtcctctcaggtaatgccataacagcatccaccatctgatcaaccgtttgttttttaatctccttgccgcatttcggacaatggggcgtaccgattctggcatataacaatcgataataatcataaatctctgtcactgttcccaccgttgaacgcggattgcggttggtagacttctgatcaatggaaatagcaggggaaagtcctgaaatactctccacgtttggcttctccatctgcccaaggaactgtctcgcataggaagacaacgactccatataccttcgctgtccttccgcataaatcgtatcaaaagccaatgaagacttaccagaaccactgagccccgtcaataccaccatcttattgcgcggtatcttcacatcaatgccttttaagttatgttctctggcaccctttatatctatataatccttctgtgtcaattctgacattgtcgtttcctttctcaatcttcttctatttcatgaagcattttcttcagttccataatcttatctctcagcatagccgccttctcaaagtcaagctctgccgcagcagaatgcatctgtttcgtcagcttgcgaatggtcgtgttcagttccttataactcatggattctgcatctttaataaagctttcttctgacttgtctgccgcctcagaaatgctgatcaaatctctgacagccttctgtatggtcttcggtgtaatgccatgggcctcattataagcctgctgaatggcacgccttcgatttgtctcagtaatggccttattcatggaatctgtaatcctatccgcatacataatcacatgcccctctgtattacgggctgcacggccaatggtctgaataagtgatgtctcggaacgcagaaatccttccttatctgcatcaagaatcgccaccagcgtaatctccggaatatccagaccttctcgcaaaagattaatccccacaagtacatcaaatacattcaatcgaagatttctcacaatttctgaccgctccaacgtatcaatatccgaatgcagataccggacacggatgccaagttctttcatataatccgtcaaatcctctgccattcgctttgttaatgtggtgatcaacaccttatggccatgctcaatctctttattgacctcggaaatcagatcatcaatctgcccctccacagggcgtacactaatctcaggatccagcaatccggttggtcgaatcacctgctcagcccttaacagttcatgctcaccctcataaacattcggagttgcagatacaaaaagcatctggctgatatgcgactcaaactcatcaaaattcaacggtcggttatctttggcagatggcagtctgaaaccataatctaccaatgttgtctttcgtgactggtcaccggcatacatgccccgcacctgcggaatcgtaatatgcgactcatctacgatcatcagaaaatcatccggaaaataatccaacagtgtatgcggcggctctcccggcttcaatcccgacaaatgtctggaataattctctattccggaacaaaaacccgtttcacgcatcatctctatatcaaacttcgttctctctgcaatacgctgtgcctccagaagcttgtcttcacgcttaaaccattccacacgctctttcaattcttcttcaatcgcacatatggccttctccatcttctccggtgcaacgacataatgtgatgccgggaaaatagccacatgctccagtctggccttcacattacccgtcaatgcatcaaattccgtaattctgtcaatctcatctccaaaaaattctactctaaccgctgtatctgttgcattagccggaaaaatctccaccacatcaccgcgcactctgaaagtaccgcgcttaaaatccatgtcattgcgcacatactgaatgtcaatcagcttgcggatcacttcatccctgtctttcaacatacccgggcgcagagaaatcaccatctcctgatagtcaatcggactgcccagaccataaatacatgaaaccgaagaaacaataatcacatctctgcgctctgataatgctgccgttgcagaatggcgcagcttatcaatctcatcgttaatcgcagagtccttctctatatacgtatctgaagagggtacataggcctccggctgataataatcataataggagacaaaatattccactgcgttattcggaaaaaactccttcatctcaccataaagctgtgccgccagcgtcttattgtgcgccagaatcagcgtcggtttattcagctgctgaatcacattggccatggtaaaagtcttacccgaaccggtaacacccaataatgtctcaaactgattgccttccttgaacccctgcaccagcttctctatagcctgaggctgatcgccggtcggggcatattcactgtgtaactcaaaatggtccatccttattctcccatctcattgtttcgctcttattatatccgctctcatcatttttcttcattcattaaagatatctttccgcacttttgatgctttacgcctattataccatttatgtttttaaaagtacatatgttttcgaatatttgttcttttcttctcgaaacaaatcctccaagaatctctgttcttaaccagatttctgcttttaacgcacaacagggtatgtactcaaccagttttatatttttgcaatcccatattctctccgcttttgcaaaaaagcaattggtttccatatttttccatgatatgatataataaaagaattgctctttaccaacaatgtctattaaataaccacgaaaggagcttaatcatgttagaaaaactttttaagctgtctgaaaatcacacagacgtcaaaactgaaattctggccggtattacaacattcatgaccatggcatatattctggccgtcaatccatctattctttctgcaaccggaatggaccagggcgctttattcactgccactgcactgatttcctttatcggtacactgctgatggcttttcttgccaattatccatttgctctggcaccgggcatgggactgaacgcctatttcgcctacaccgttgtccttggcatgggttacagctgggaatttgccttaacagctgtattcgccgaaggtattattttcatccttttatccctgactaatgtacgtgaagcaattttcaatgcgattccaaagaatctgaagtccgccgtcagtgtcggcatcggtctttttattgcatttgtcggtcttcaaaacgccaagatcgttatcggcggttccacattggttcagcttttctctgttgagaaatacaatgagctgaacggtgtcaatgcttcatttaatgatgtcgggattactgtcgctctggcgcttataggtatcctggtgacaggtatccttgttattaagaatgtcaaaggcaatattctgtggggcattctgatcacatggattcttggcattatctgtcagtttgcaggcatttatgttccaaatcctgaactcgggttctacaatctgctcctggatttcagcaatggactttccattccgtccctgtcaccaatccttttcaagctggatttccacggtattgtcagtgctgattttgtcgttattttatttgcctttttatttgtcgatttatttgatacgatcggcaccctggtaggtgtttcatccaaggccggtatgcttgatgagaacggcaagctgccacgtatcaaaggtgcgctccttgcggatgcaattgcaacaacagccggtgccgctctcggtacatccacagcaacaactttcgttgaaagtgcttccggcgtcacagaaggcggacgtactggtctgacagccctgacaacaggaattttgttcggcctgtcattgtttctgtcaccaattttcctggcaattccttcatttgcaacagcaccggcactgattattgtgggtctttatatgttgagcaatattaccaatattgattttgcggatatgtctgaagccattccatgctacatctgcatcattgccatgcctttcttctacagtatttcagaaggtattgcactcggcatcattgcctatgttgttctgaatctggttacaggcaaagccaaagagaagaaactgaatcttctcctgtatattctggcaatcatctttattatcaaagagtgctcatcactgttcttctagattgcaaaaagggattgaagaaaaatctgtgtatcgatttctcttcaatcccttttgcttacacgaaaattcttcttatttcttattctgcctgaatctcctgcagcacaatctcctgggctttctcaagctgtgtatctgtctcgctgtcggaattcaattccacttctacatccggatcaatacctgttccatggatattgcgtccatttggcgtatagtacttggcacttgtcagcttgatggcggaaccatctcccaatggcagcacatactgaacgatgcctttgccaaaggatgtggtacctaccagcttcgctttgccgtaatcctgcagacagccgctgacaatctctgaggcactggcactattgccgttgatcaaaacactgattggcacgttaatggtctcatcatcctctgtgtattcttcctgtttcttaccattcttgtcaacagtatacacaagcaactgatcctttgacagaattctgtcaagaatagccgttgcagagttcaccaggccgcccggattatcacgcagatcaatgatcagccccttcattccctgagctgtcagctcatctatggcctgattaaactgctctgacgttgtctcttcaaattcatagacagccacataaccgatattgttgtccagcatcttggatgtcaccatcggaatctcaatggtcttgcgctctacctcaaatgtcaaatatttatcttcagatggtctgtaaacttcgatactgacagttgaaccctcttcacctttaatccatgtgacaacctccgtcacatcaacacctgtcacttccttgtccgccactttatacaaaatatcatccttgagaataccggcttccgctcccggtgaaccctcaaaaggacgcacaacggtaatgacgcctgtctccttattctggctgacaaccacaccaataccggaatatttgcctgatgtggactcctgcagctgatcatactcctccttggtataataaacggtatatggctcattcagtgcatccacatagcctttgtaaataccttccaccatatcatcctgggtgatatccgaatcatctgaaacatccagataatactggtcaagcacactgtgcagcttgttcagtttcttctcaacttccttataccgtcccgaaatatccgtcacatcaccactggatgaagacacatccgatgcctccacagcatttcctgttcctgtggtctgacctgttgatgacggcgcataatctttcaaaaagcacccggataacgccagcacgcctatgatcagcacacacaggatcacacctgtcaaaaggcctttataatagctctttctgtcatttctgttctccatagtctgtctccttctgaaaacagacaattgccaaccgccattgatccaggaatataaacaatcacagtctgcaatcatccgtttaaaaattgctgaattttattctatagtaacacaaagagctggctcagacaattgtctgaagccagctttcttaaagttcacaaattgttcgcaattcgcagtgagtgattcaacatcttcactgctgtcgcaatgattcaattgtcgtaccggatatcagacacggatatgcttgatcaatgtcagataacttccgatgaaaccaatgccaagaccgatgatcaatgaaatcgggatcaggaccttgaaaatctcgcctgcgggcaaaaacgtcataaatctgctgagactcgtgaattctgttgtcataaatgagataaccttctcatataatactttcagcgcacacaccggaatcagtgaaccgatcagaccaatgagcataccttcaatcaggaatggtgctctgacgaaaaagtctgttgcacccagatatttcataatcgcaatctcttcatgtctgacagtgataccgatcataaccgtattactgatcaggaagacagcaacacccacaaggatgatgataatagccagtgaaacataactgagcagacgtccaaaacttgcaaagctgtcagccacgctcttggatgcattcacagaacgtacaccatcaataccctgaatataatccacaagttcctgctgcttggcagcatccttcaaataaacttccagactggctgaagaagccagcgggttatcattgtccagatttgtcagaatgttctggtctgtgtccgggaaggccttctctttgtactcttcccaggcttcctctggtgatgtatagtgaacattgtccacttcttcacgctgttcgatctgagacttaatatcaagaatctgattctcctcaacaccttcattgaaaaagactgtcacaccgactgttgtctctacttcggaaaaaatatgctgaaagttcatcaccatacagtagaaaataccaaaaataaacagacaggctgtaatcgtaccaatagatgccagtgagaacagacggtttctgaatacatttttaataccctgtttgatgccatataaaaaactactcatagatatacccgccttttctctcgtcactgatgatcacgccttcactcatcgtgataacacgtttctgcatcttctcaacgatttctttgttgtgtgtaacaacaacaacggttgtaccacgcatgttgatggcctcaagcagtttcatgatttcccatgaattcttcgggtccagattacctgtcggctcatctgccaaaagtaacggcggattgttcacaagcgctcttgccagagcgactctctgctgctcaccgccggacaattcgttcggataggacttggctttatccggaaggcccaccagcttcagcatggccataacgttcttcttgatcagacgattcggggcacctacaacctgctgggcaaacgcaatattctcatagacattcctgtctttcaaaagacggaagtcctggaatacgacaccaatccctcggcgcaacttcggtactcttctcctgcggagtcgtccaagattcttgttattgatataaatggtgccggatgttggctccatttcttttaaaagtaacttaaataatgttgtcttaccggaaccactctggcccacgacaaaaacaaattcgcctttcttaatctgaagactgatgccctttaaggctttcacatctcccggataggtctttgtcacctgatctaaggctatcaattgcttcccctccttcaagaaggaatcttttagtaatcaaaagtttccatataattcatatacttgacaaccatcagtgcaatcttgaatgtgatggcgtcctcaaaaacacgcaggtcaaggcctgtgctcttctgaagtttatccagacgatataccagtgtatttctgtgaatgtacagctgtctggatgtctcagaaacattcaggctgttctcgaaaaacttattgatcgtcatcagcgtttcttcatcgaaatcttccggtgacttgctgtcgaaaatctctttgataaacatcttacacagtgggatcggaagctgatagatcagacggccgatacccagattgctgtaagcaactacattacgttcattatagaaaatcttacctacatccagtgccattctggcttccttgtaggatcttgatacatccttgatctcctgcacgattgtaccaagggcgattcttgcctttggaagattctccccgcagagcatctcataaatcaccttcgatgccttgcagagatcatcataagtctcattatccttaacttctctcacaacgatgacattcttctcatcaacagctgtgatgaaatccttcggacgtccggtataaatagaacggactgtctcaaggctgttcatatcccgctcattgttcacttcaataagcagtacaattcttcgtacatccgtatcaatatgcagtttcttggaacgattataaatatcaacaagaagcagattatcaagcagcagattcttgataaagttgtccttgtcgaaacgttccttgtaggccaccagcagattctggatctggaaagacgccaccttgccgatcatatagacatcatcactgtctcctcttgccagaataataaactccagctgatgctcatcaaaaaccttgaaaaactgaaacccttgcaaaacctgactgtctgccggtgaattgacaaattccaacacaaacttttcataatcctcagcattggaaaatgtagaagcaagtacctttccttcaatatccatcacgcataaatctattctggtaatcgctttcagcccttcaatcgtattctgtaaaatctgatttgaaatcataatgcaattctccctaccttcccgtaatctattgtcatatactcttattattataataaagcacatcaaccaaaaaataaagtgttttttatatatttttcatatatttttctttgaaacctgtgcttttttctcattgaattacaacaatattacgatttaaaggagtgaaccatgaaaatcaccaattttactattgttttttgtctataatcacaattgcttttcaaagaacagttcctgtacactataccagaaaatcataaatattgcaatattatttcacaaatattacataattcgtaattattttgagataaatatggtgaatgtcaaaatgaggttccaaatgaaccttttcacacaaacccctgtcaatataaacgagcctgtgatgaattttcattggaacctcagttggatgactttaaatgttggactagttaatggctgttactttgtagtctttatcttcgactgttttcttcagaacgtcatctgctacgtctgctgagagttctacgactgctgtaccggcttcatggctgacttccgcagatgccacgccatcaagaccttccagtgctttcttgacagttgcttcacagtgaccgcacatcataccttcgattttcattgttttcttcattgttcctatctccttattttcttgattatgattggttttattgttatccaccagttcttttattatagcaggatttttcaactttttgtccttttttgcatcatgcatgttaaaaagattcaagcgcagtgcattggtgacaacacagaagctggacaagctcatggccgccgcaccgaacatcgggtttaatgtccatccgaaaatcgggatccacacacctgctgccagcggaataccgatcacgttgtagaaaaatgcccagaaaagattctcatgaatatttcttaaggttgcacggctcagacgaacagcggctgccacatcactgagccggctcttcatcagcaccacatcagcagcatcaatggccacatccgtaccggcaccgatggcgatacccatatcagctcttgtcaatgcaggcgcatcgttgataccatcccccaccatcgctaccttgccatattgctgcaactttcggatcacactctctttaccatccggaagcacaccggcaatcacatcatccacaccggcctgtgcaccgatggctctggctgttctctcattgtcaccggtcagcaccacaacccggatgcccatattccgaagttcactgacagcctgtctgctgtcttccttcatggtatctgcaacggcaattatgccggccaatctgccattctctgcgaaaaacatcggtgtcttcccctgttccgccaatacctctgactgtttcagcaaatcctctgacacttccgtctgtgttctgataaatgcataattgccgccggccaatttgacaccatttctgacagctgtcagtccattgcccggaagtgcttcaaactcagaaacgtcttcgacggtcagctgctgttctccgacatatttcaaaattgcctttgccaacggatgttcactgcgtttctcaaggctggctgccaacgcaagcaatgattcttctgtcacaccctccgcaggaaccatatctgtaacaaccggttcaccgttggtgatggtacctgtcttatccagggcaacaatttgaaccttgcctgtctcttccagtgaaacagctgtcttaaagaggataccattcttggcacccataccattgcccaccataatagccaccggtgtggcaagaccaagggcacacggacagctgataaccagtaccgaaatgcccctcgccaaagcaaaaccgacactttctcctgccagcagccacacgatcatcgtaataactgcaatagtgatcaccgccggtacaaaaacacctgagaccttatctgcaatcttggcaatcggtgcctttgtcgccgctgcatcactgaccatctggataatctgggataatgtggtatcttcaccgacacgggtggcctcacagcggataaatcctgactgattcaaggttgcagccgatacgacatctcccgacttcttgtccacaggaatgctttcacctgtcaaagccgcctcattcaaagcactggttccttccaggatcacaccatccaccggcacattctctcccggacgtacaaggaatatatctcctttcttcacctgctcaatcggaacagtaacttcctgaccattccgttccacaaccgctgtcttcgaagccagtttcatcagccctttgagtgcatctgttgtcttgccctttgagcgtgcctccatcatcttgcccactgtgatcagtgtcaaaatcatggctgcagattcaaaatagaactcatgcatataatgcatgaccatctccatatcgcccttcacctgagcatctgtcatggcaaataacgcatacgtactgtatccaaaagccgccgtagagccaagagccaccagcgtatccatattcggggcacgatgcgcaagacttgtaaaaccactgatgaaaaacttctgattgatgaccatgacaatccctgtcaacagcagctgaacaagccccatggctatatagttgttctcaaaaaatgccggcagcggccatccccacatcatgtgtcccatggaaaaatacatcaatacaatcaaaaatcctagagatgccagaagtctccgcttcagaaccggtgtgtcatgatccttcagcatctcctcctcagctgccatcgatgaagcccctgaatgctctgcagcctcacccttcacggaggctccataaccggccgcttccactgcctgaataatcgcctgatcagcagccgtcccttccacacccatggaattcgtcaaaagactgactgaacaggaggtaaccccctccaccttcgagacagctttctccacacgggcactgcaggctgcacagctcatacctgtcacaataaattgctgcatgaatctctatcctccattctctctcgtattcgcaaacgatcagatctgcaaattttactaaaaataatatagtagtttttcccaaaataagtgaaccattccacatgaaacctgaaatgtctcataccgtcaagttaccccacccccctggggtcatttttattctatacctaataaaaataaaagtcaatgctccttattgaaaaaaacatgcagcttgacattgaatcacactcataaaaatgctagaataataattaatacagacacccctggagggtgcccaacgaaaggagctcgccatgaaagcagaacagcagaatattaaaaggctgctcaatacagcaaagggacagattgacggtctgaacaagatgatcgatgatgacaaatactgcatcgacatttccaatcagattatggctaccattgccatcctgaaaaaggtcaatatcgaaattcttgatgcccatttaaaatgttgtgttcttcacgcagatgaccgtgaacgtgaaaccaagatcaacgaaatatccgaagtgctcaagaaagcactgaaatagcattggagtttttatcatgacaacgaacaaaaccgtttttataaccggtgcctcaagagggattgggcgtgccatcgccatccgttttgcagccgccggctatcagcttgccctctgctgtcggcaaaacacacagctgcttgaagatctgcagcagctgatcatcagccaatatcacaccgattgtcttattttcaccggcgataccggcgactaccatcagctggaagccatgatttctgagaccattgcacgttttcatcatattgatgtccttgtcaacaatgccggtatctcttatatcggtttattaactgatatgtcaccggatgactggcagcgcattgtcaacaccaacctgacatccgtttttaacagctgccgactggccgtaccgggtatggtccatgaacattccggcaagatcatcaatatttcttccgtatggggctgctgcggcgcatcctgtgaagtggcttattccgcaacaaaaggcggcatcaatgccttcacccaggccctggccaaagagctggccccaagcaatattcaggtcaatgccgttgcctgcggagccattgataccgaaatgaacgctttcctatcggaagcagatcgcattgctttaactgatgaaattccttccggtcgtttcggtcgtcctgaggaagtggctgaacttgttctggatttagcccaaaagcacagttacctgaccggtcagatcatccggctggacggcggatggatttgatgccggaatagagaaagtatcttataaagtaaaaaagaatgtgctttggcacattctcgcgccgagcgcggtcgcttgcgacaatctgcatcttcgcgcgagtgcgcatcacaggcgcgttagtgcctttttatgtaatagggaattcctcggaatttcctattacataaaaatatgccctgggattatgatcatcccggggcattttagtcacaaaagggattcgaataatctcgaatccctttctctattcactattcaattatggacttacataatacagagggttcacataatctccacctacagtcacaccaaaatgaagatgtgcaccggtagaaatacctgtagaacctacggctgcgattgtctcaccctgtgatacggactgaccaacactgacatataaagcactgcaatgttcataaacagtgcagacaccatttccatggctgataactatgtaattacccatcgcactgttgtagctggcagttataacagtaccgcttgctgcagcccaaatggatgaacctgctgaagcgccgatatccagacctctatggtaagaagatgcacctgcagtcggtgaacttctgtaaccaaagtaagaagtgatggatgaactgcccacaggccagatcatacctgtacttgagctggatgaactggaactgctggagctgtcatcataatatgaatcgttggaactactggagttcgaactgctggatgagctgcttgagctggagcttgaactgctggatgaactggagctgttgtatttcgcagcttcttcatctgccttcttcttagcagcagcttcttctgccgctttcttcttggctgcttcctctgcagccttcttgcgtgctgcttcttctgctgccttacgttcctgctcaacaatctgctgaagcaggctgttctcagcatcaatctcttcctgtgtagaagaaatatcagagttgacagaatcaatatcggaaccaatagcaaccagttcttcttccttctgtgcaacgatcttctcaagagattccttctctacttcatactgttccttctgagcttcctgaagctccttctgctcttcgagctgagcttcgtatgctgcaatctgatctctgatattctggagactcacaagaagattgtggtcatactcattgatcttggaaatatactcctgattgttcaacattgtcttcaaatcgcccgaaccaagcagcatctggagataatcatcgtctccggattcatacatggccttgatacgtgccttcaatgctgtatactgtgtcttctcatcttccttggcctgtgccaggttgtcctgcgtaatgctgatctcagactctgtctgctcaagctgtgcggatacttcctctaactgtgcaagatatgtcttgatcttactgtccagttcagaaatataggactctgtatctgacttattcttcttcaatgatgcaagctgcgactcaagttcgctctgctggttcttcaaattctctatctggctctggacttctgacttcgttgccgccattgtcggaactgcaagtgaaacgctgagcgcagcaaccagaacacatctggtaaatctctttaaaccgtgtttcatgaaatactccttccaaaacgctgtttcaatctcaataataatagggttcctccacgatatatcgtatataaaaacccatctgtgcataattatagcattttcgggcgcctatttcaagtgtatttctaaattatttcaaaattattacaaagtcatctgtactttgcagattttacattaactttacatcatctgtgatctgatttggttgagatccgcaatcaaggcatccacattttcttcctttgtagcccagcttgtgcagaatcgcacggcactatggctctcatctgttttctcccagaaagaataactgtacttcccggctaatttttcaagaacagcatccggcaaaacaggcagctgctgatttgttgaattctccacataaaagctataaccgcacgcctggaatgcttttttgagtttcatagccatatcaatggcatgtctggaaatctgccaataaagtccatcctcaaaaagcgtctggaactgaataccaagaagccgtccttttgccagcatgccgccgcgctgtttgatcatatagcggaaatctttactaatggaaggattcgttatcacgacagcctcaccaaacaacgcaccgacttttgtaccgccaatatagaaaacatcacacaatctcgcaatgtcttccaatgttacatcattatctgctgccatcagaccataaccgaggcgggcaccatccaggaataatggcataccgcattcatggcagacatgactgattgcttccagttcctgcttataataaatcgttccattctcagtaggattggaaatatataccattcccggctgaaccatatgctctgagctgccatcattcatatgtgcttcataggctgctttaatctgttcagctgttatctttcctgcatgatcgcaaggcagagccagcactttgtgtcctgttgcctcaatcgctcccgattcatgaacattgatatggccgcttgctgctgtcagcaccccctgatatggccgaagagcagtgcagataatggtcgtattggtctgtgttccgccgaccaaaaactgcacatcaatatcctcgcggccacaggccttacggatcaaacgtcttgcctcgtcacaataaggatccagaccataccctggggtttggtccatgtttgtctcaaccaggcgctccagaatcttcggatgggcgccttctgcataatcacactgaaattctatcatcattctaccgttactgaaaacttataaaaagttataaacttccatgtttcattcctatttcaacgagtatgcttttgatgatataaatatctatctactcacaagttcttgtactctccataggcgtaaattccggaccaaactgatatagccatctactggctagaaagaacaaatcccttcttcttaatttgtccttgacaaggggtacactttattccgtgccgcacatacaatgaagggcatttgcctgaatcttggattcgacaagctctatgaagtgagtgcggctttaactgaacagctgcgcggatacgaaattaccggcagtgaagccgtgtatcagcaggttgttgaacagtatgaccgtctgattgctgcaattaaggcgattgattaaaggacgttgattgatgattgattgaggcaatgaatgtgtcaaaacaatagagaatagagcagcggtacacatcggaaatgatgaatggcgctgctctattttctattgtttttattttaaacaaaaggccggaccacacctttaactaaagaatgctgatagttaagaacagcagattctgttacctgatttggccaggcttcaatgactttatcatcgccaaggtagatggcagaatgaatgacggtacctttttcattgcagtagataatgatgtcgccgcgcttgcgttctttgtaatccacatgtttgaatttagaggaggcccagatatttgcggattcatattcataacccggtgaggcatgccgtacaggattgatcggactcatatcgataccggcggcataaagggcctgcataatgagaccgctacagtcgatgccaagccccggtgcaccggatgcgccgatgatataattatccccgagatagtcataggctctgctgatcatggcttcaatacaggcagtccgactgctggtattgtctatacgaagcggtgaaacataggcaccgagggtgtaccagtcatcctcagaaagtcccatggccagccatgtactcagatcgactgtgccggtggcattcagaccatgctgagcttgaaaatcagcaactgcgtcggcaatttcagatgtataaagggcaccgttcataccaacagcattgcctagccccagtgtctggatcactttggctgtttttaatccctcatagccctcagacaattcatagtcaccgccggataaggaaatactgtcccgaatctggtaatacttcagtggattctggtaaatgcggtttcccagaactacttcatgggacagaaactgttcgtataccatcaaaccgcccgagcaaacaacaaccactacaagaaacaacagaataattcgacgccttaaagccctgcgtcgggccttcttcctggctctttgcctttttaaacgcttttgccggagctgttctctgacgattgattcatcaaccagagcagctccatcctcaaaagccagttcagtatataaccccttaatatttctgctcataattattatccccctattacatgatgttggggtcaaaaggtattttgacccctttgataccagattgctacgtgctttgcactttcgcaatcctcaaaaatattcgtagaccgatgagtttcgcatgccatatccaatgaacctaataaaaaaataccattcccctgcatcacaattgtatcgcttttattgattattacgtttttagaaaaaaattctgacatgctcttctctattttttcattatttgttatactataccgtatattagggaaccggatgaaacacgctttgcgagtttcatccggtatcgcgatatttggcaaggtgccatgcgagcatggactttgcctcattattcgcgtaaaatatttactgatttaatgtgataaagaaatcggtgaatacgggaaagaatgtatgtgataaataaaagcagatagaatgtaagatgcggggaatcttgcgagcaagatccttttatataaaaaatgatatctgctgtactgtttagatgagactggaggaatgaagatggcaatcacagatgaaacaatagaatatgtagccgcactggcaaagcttgatctgacagatgaagagaaagagcgtgccaagaaggatctcggcaatattatcggctatgtggatacaatgaatcaacttgatacaacaggtatcgagccgatgtctcatgtatttgcctatcataatgttttcagggaggaccttgtgacaaacggaccggacagagacaatattctggccaatgcccctgaagagaaagacggcggtttcaaagtgccgagaacggttgaatagcgaggagagaaacagatggagatcacagcattaacagcccttgaattgggaaaaaagattaaagcgggcgaagtgacggtggaagaagctgttaaagcccagcttgagaagataaaagaacgggatagcgtgtataactgctatgtgacagtgatggaagaagaagccttaaagcgtgcggcggaagtacagaaacagatcgatgccggtgaactgaaggactcaccgttggccggtgtacctgtggcaatcaaggataatatctgcacaaaaggtgtcctgactacatgcagttcgaagattttgaataattttaagccaccttatgatgcgacagtgattgagaaactggaagcggcaggggctgttattattggtaaggttaatatggatgagtttgccatgggaagtacaacagagacctcttattttggcccgacaaagaatccgtggaatacggaacgtgtaccgggtggctcttcaggcggtgcggctgcagctgtagcggctgaggaagcatggtatgcactgggatctgataccggtggttctattcgtcagccaagttctttctgcggtgtcacaggtctgaaaccgacttacggcagtgtttcacgatatggtctgattgcctatgcatcctcattggaccagattggaccgatcgcaagaaatgtttccgattgtgcggcagtttttgaaggcattgcaggttatgatgccaaagacagtaccagtgtgaagatggatgattatcattttacggaagccctggtggatgatgtgaaaggactccgtatcggtattccgaaggggtatctgggtgaaggtctggatccggaagtgaaagaagctgttttggcagcagcaaagacactggaagcaaaaggcgccattgtggaaatgtttgatatggatatggtggattatgcgatcccggcttactatgtcatcgcttcggcagaagccagctccaacctttccaggtttgacggtgtgaaatacggttaccggacaccggactttgaggatcttcaggatgtttacaagaaaacccgtgatgagggctttggtatggaagtcaagcgtcgaatgatgatcggtgcctttgtattgagttccggttattacgatgcttactatattaaagcgcttcaggtcaaagcactgatcaagaaaggttttgacgatgcatttgcaaaatatgatatcatccttggaccgacagcaccgacaaccgctttgaagatgggtgagaatctgtctgatccgctgaagatgtatctgggtgatatttatactgtttcggtcaatctggcagggcttccgggtatcagtctgccatgcggtatcgacagcagcggactgccgatcggtgtgcagatgatcggacaggcattttcagaaaaaacattgattcgtgcggcatattcactggaacagacaagaagctatgaacggccggcatgtgtgaagggagagaactagacatgagagaatatgaaacagtcattggtcttgaagttcactgtgaactggccacaaaaacaaagattttctgcggttgtacgacagaattcggcggcgaaccgaatacccatgtctgccctgtctgcgcaggtatgccaggtactttgcctgttttgaataaacaggttgtagcgtatgcgctctcagccggtgtggctttaaattgtgatattacacagtactgcaagttcgacagaaagaattatttttatccggatcttccgaaggcttaccagatttcacagctttatctgccgatctgccgaaatggtcatgtggacattgaagtggatggtgtgaagaagagcatcggcattcatgagatccacatggaagaggatgcaggaaaactgattcatgatgagtgggaagactgcaccattgttgattataaccgatgcggtgtgccactgatcgaaattgtcagtgaaccggatatgcgcagtgcggacgaggtgattgcttacctggaaaagctgaggatgattttgcagtatctgggggtttctgattgtaagatgcaggaaggttccctgcgtgcagatatcaacctgtccgttcgtgaggcaggcagtgacaaactgggcacacgaacagagatgaagaatatgaactctttcaaggctattgcccgggccattgaaggggagatgaaccgtcagatcgagcttctggaggacggcaaatccgtcacgcaggagacaagaagatgggatgacaataaatgtgccagctatgccatgcgttccaaagaggatgcacaggattacagatacttcccggatccggatcttccacctgtatccatcagtgatgcctggcttgaaagggtgaaagcggctcagccggaaatgcgtgatgccaagctggctcgttatgtagaagaatatggcctgacagaacacgacgcagccattttgacggaatccaggaaaatggccgatattttcgaagcggctgctgctatctgtaaaaagccgaaggaagtttcaaactggttgattgtggataccatgcgtttgcttaaagtacatgaaatggatgcggcagatctgaaattctcaccggatcatcttgcaaaattgatcgaactgattgatgcaggcactatcaatcgaccgacagccagagatgtttttgaaaaggtttttgcagagaatgtggatcctgaagcttatgttgaggcaaacggtctgaagattgaagctgatgacggtgccttaaaaggcgttattgaaggaattgttgcagctaatccgcagtctgtggcagactatcatgcaggcaagaagaaagctatcggtttccttgtgggtcagaccatgaaagctatgaaaggcaaagctgatcctggaacggtgaataagatactggcagaaattttgaatcagtaaaattgataaaggggtagaatgtatcaatggggaattttttttcaacggatggaccgttgtttgaaggaatggcatatattatcaacattatctatgtcagtgtcttatggatattgttttcaataccgattattaccatcggcgcatcatcgacggcactgtattatacggtgacgaaggtgatccgtcatggacgcagttatatattcagggagttctggcagagttttaaatccaatctcaagcagtccacggcagtatggctgatttatctggtgatgatggggattctgcttgtggatatccgggtgatgggcgctttcggaacagctgtttcacagacactgcagtttgttttcgttgttggtatctgcatggtatcggcggtgatggtttatgcattggcctatattgcacgttttacccaggatgtacgacatattttgacaaacagtgtgctgatggccatccggcacttgccgaaaacactgctgctggttgttgttctggcggcggcagtgctgggctgttacctgtttgggcttgggattgtctttatccctgctgtggcagccctggtggatagtctgatcctggagagtatttttgttcagtatatgagcaaagaggatcgggagaaagaagcattgcgcaaccatccggaacagtatgagtactataaccgaaaagaataaaaatctctgccgaaggttcttttattggtgcaaacaggagtatcaaataagagcggcttcataagtacatgaattattgttttattaataaaacttataaaaagaaaaaatgccgattttcgtgggaaaatatggcattttttttaaacttaattgttaaaatcctattgattaaacaatctatatgcgttaaaataggggcgaacagagaaaatacgtcgaataatgacggaaactcttgagattacttatggacatctataagcactatttataagtggcttttataaatgtttctattaattttatgaataagtaaagcggaagatggaggcaatcatggaaaagaaagaattgttatacgaaggtaaagcaaagaaggtttatacaacagagaattcggatgttttaattgtggactacaaagatgacgcaacagcatttaatggtgtaaagaagggtacgattgtaggcaaaggtgttgtgaataaccgcatgacgaatcatattttcaagatgctggaagagaaggggattccgactcattttattgaagaactcagtgacagagagacagcagtgaagaaggtcgaaatcgttccgcttgaagttattgtaagaaatgtagcagcaggcagcttttccaagaaacttggtattgaagaaggcttcagactgttaagcccgacactcgaattttcctataagaatgatgaactgggcgatccaatgatcaatgattattatgctgttgccattggtgcagctacaagagaagaaattgacaagattacagaacttgtttttaagatcaatgaaatcctggtagattatttcaagagcatcaaagtagatctgattgatttcaaagtagaattcggtcgttacaaaggtcagattatccttgctgatgaaatttcaccggatacatgtcgattctgggacagtgagacacatgagaagcttgacaaagaccgtttcagaagagacctcggacatgtagaggaagcttatgaggagatttacagaagaatcggtctggcgtaagtcagtggatcaggaggatattgtggaaaagcagcttcagaataaaggccgcagtgaatgcggcacagatataaaagatgaacttcatgaggagtgcggcgtctttggcgcttacaatctgaagggtgaagatatcgccaattgggtatattacggtcttttttctctgcagcatcgcggacaggaaagctgtggcatcgcagtcagtgagaatcgtgatatccgatattataaagacatgggacttgtcagtgaagtttttacaccggagaatctggacaagcttcatggtgatattgctgtcggccatgtgcgttattcgacagcgggcagcagtgtgcgtgccaatgcacagcctttggtaacaaagtacatcaaaggtacattggccattgtacataacggcaatctggtcaatgccgttgatctgagagaagaacttgagaaaaacggtgccattttccagacaaccattgattcagaggttattgcctatctggtagccaaagagcgtgtgacaagtcgttctgttgaggaggccgtggcaaaagccatgcagtatatcaaaggtgcctattctctgcttgttatgagtccgagaaagattacggctgccagagatccttttggcttcaagccgctttgtctgggtaagagagatgatacttatgtggtggcttctgaaacctgcgctcttgataccgttggtgctgaatttatcagggatctggaaccgggtgagattatcacgatcactgaggatggtgtgaaatccaatcgtcagtattgcaatatggtgaaaccggccagatgtatttttgaatatatttatttcgcaagaccggacagtgtcattgacgatgtgtctgttttcgcttccagaatcatggcaggcagaattctggctcagagccatcctgtagaagcagatatggttgtgggtgtaccggaatccggtaatgccgcagccatgggctattctctggagtctggcattccgtatgggcaggcttttgttaagaatacttatgtcggccgtacattcatcaagccgaaacagagtatgcgtgagcagagtgtcaagattaaattaaatgttctgaaagagaacgttaaaggcaaacggatcatcatggtggatgattctattgtccgtggcactaccagtgcgaatatcgtcaccatgctgagaaatgcaggggcaacagaagttcatgtacgcatcagttcaccgccgtttaagttcccttgttatttcggaacggatattccaagcggtgatcagctgatagccaatcatcataccatcgatgaaatcagacagcttctcggtgcggactctctgggttatctggactgcgacagaatgaatgaaatggtcaaagaccttgaatattgcgacgcctgtttcacaggaaactatcctgtagaccctccgacgagagacatccgcggagacatggaagtttaaaagcttctgaactgaaaagttcaataagcctgcggatgaagcgtgtcattatagaactgtgagaaacacgctccgcgagtttctcgagttatcgcggcctctacactccgtttcggtcgttgctaaacaagcgccactggcgcttagcaacgccaaggtctcgtgcaagcacggactttggctcgttgctcgcgtaaattaaaaatgagcaatgcagcacaggcacgtttgcactgcgataatgccggcagtggtacataaggcggtaaaaaacaccgcctgagaaccagccgcattataagcacctgtactgtattgctcgttttaattctatatttgaagtatttgaccgcaggctgtaagaaaaatcagttcagaagattttaaacttctgccgggaatcgaagaatcccggacaaagcagatatcatacttctgcaaaaatatagtagcgttagaaataaaaaaatgctataatgagcgatgtaagaagacagaagaagcttttcaacacttaggttgaagtgagtcggggatttgttttcttttaatcaattatgcgatgagattaacagggattgtgaaacttgatacatcccggaaagaagatataaaaatcgacaggtcataagcaggtgcttccaatgtggctggtacttaggcgctgttttgtagcgccttatgtaccactgccaacgttgggcagcgcgagcgtgcctgctatgacctgtcgatttttatatctttccgataaacctgaagtttcacaatcccgtcaaataaaaggagaaaaattatgaatcacgagatttatcagagccccctttcagagcgttatgccagcaaagaaatgcagtatgttttttcaccggagatgaagtttaagacatggagaaggctttggatcgctctggctgaaacagagcagggactcggtcttgatattacagatgagcaaattgcggagctgaaagctgctaaggatgatattaattatgatgtagccaagaagcgtgagaaagaggttcgtcatgatgtcatgtctcatgtttatgcttacggacagcagtgcccgaaggcaaagggaattatccatctgggtgcgacatcctgttatgttggcgacaatacagatgtgatcattatgcgtgaagcgctttacattgtcagaaagaaactgatcaatgttattgcagaattgaaagattttgctatgaagtacagaaatatgccgacactggctttcacacatttccagccggctcagccgacaactgtcggtaagagagcagcactttggctcaatgaactgatcatggatctggatgatgtgaattatattatttctcagttgaagcttcttggttccaaaggtacaacaggtacacaggcaagtttcctggagctttttgatggcgaccatgagaaatgcaaagaggctgataagagaattgcccagaagatgggatttgaagcatgttttcctgtttccggacagacatattcccgtaagctggatacacgtgtgttgaatgttctcagcggaattgctcagagtgcgcacaagttttccaacgatattcgtcttcttcagcatctgaaggaaattgaagaaccatttgaaaagcatcagatcggttcatcggcgatggcttataagagaaatccaatgagaagtgagcgtattgcttctctttcaagatacgtgatggtagatgttctgaatcctgcaattacagcggcaacacagtggtttgagagaactctggatgattcagctaataaacgtctcagtgtgccggaagcatttcttgccattgatggtattctggatttatatctgaatgttgtcgatggtctggttgtttatccgaaggttattgaacagcatctgatgaatgaactgccatttatggcaactgagaatatcatgatggatgcggtgaaagccggcggtgacagacaggaactgcacgagaagatccgtcagcattctatggcagcaggccgtgttgtcaaggaagaaggcaagccgaatgaccttctggaacgtattgcagcggatccttccttcggtatgacaatggatcagctgaaagcaattatgaagccagagaactttgtcggccgtgcacctcagcaggttgaggaatttgtcgaggaagtgattcagccgattttggatgcgaacaaagaattattgggtgtcaaggctgaaattaacgtataatttgtaattattcagagccaagcaaaatttcgaaaacaggtataaaatgcttgcatttttaagactgtttttgaaattttatttggcggatacgccacaccgacgaaatgcgtagcattttggaggttagctctgaacagttacgtataatttaattaaagaagttattagtggcagcattatgtgtaaaagcatggtgctgccggtttgagtatgggggaaaagacttgattacgtttgcaatcacagatatcggggattttacaagaaaattactgattcagaatgtttttgaccagttttacgttctggagggagaagtatccacatttgctgcttttactattgacggggaattaaacgaggattactatagcagtgatgaaacagagcttcttcaggacagaaaatggagtctttggtcggagattaagccggtggcttttttgctgatgaaggggaagaaactgcctgtttcattcaaatttgttctgcagctgtctgatcacaatacagactggctccttggcaaatatcatttggaacatttgaaggaacagctatccggactgtatctgaatattcgctatcaggacaagaagctgatttgcgtcacggggctttcttataaaacttttgttatggataagacactggaacatgtctgggatgacactgcggcgcagtttatgaagcagaatgggattacagtggaaaaagtgtagaaatgttggaggaaaatacaatggataaaacaatctttgtgttgctggatgcctgtcagtacgaagcggccagcaagtatttgggatatcttgaacatatgattgattataataaaggtgcgaaatataaagtgttgggtgaactgccgtcactttcaaagccgatgtatgccaccctttttaccgggcttcctgtatgcaaacacggtgtgacctgtaatgaggtgggtggagtactgccttatgacagcgtcttttcattgtgccgcaaggccggcggcagaacagctgcgatttcttattcatggatgagtgaactttacagcagggcaccgtatgtatcagacagagacagggtgcagttggatgctgagggctccattcagtacggtatgtactactgggatgacaattatccagattcccacgtcttcgccgagggagaatgcctgcgcaaaactttcgacccggattttatgctgtatcacactatggcggtggatgaatgggggcacatgaaaggggcagacagtgctgaatatgccaatgcggtggctgctgtgggacatcttatagcggcaagaatgccggaatggttggagaaaggataccaagtagtggtgacagcagaccacggaatgaacaaccttggtattcatgtggggacggaacatgcccagagagaggttgcactctatattttcagcgataaagtggagaatggacgttttgaggaaaattatatttcacagctgaatgtggcaccgctggtgtgcaaactgatgggcgttccagcgacagagggtatgaagcaggagttggagattgttttttctaaataattatatgattcaaaataagcatacaaaataatcaatcgaatagtaaaagaaaaagattctgatagatattgatgtgagatatctgttcagaatcttttcttttatagaaaatcttataaagccatcggcagtgcggaactgacctgatggatttcaacacctttttcgcggatgcggcgaagttcttccgggtccgcatctgcgccggtaatcaggatatcgatgtcctgaatctgtgcgcttgtgaaactgtgtgttttgccgattttgctgctgtcagcgataatgatgaccttgccggtgcagcgttctaccatcttgccgttgacgatggtttcctggagattggaagtggtagctccgttctctgcggtgatgccgttgacaccgagaatgcttaagtttgcataaatctgattaatgacattcgtggcaaaatctccgtggcaggctttggtcaaatcggaataggtgccgcctgtgtaaatcagttctccaccaaggtgcgggcagcattcataagccagaatattgttggtgacaatattaatcggacgattgttcagaagcttcagcaattgataaatggttgttcctgagttcataaaaatcgtatcacggtcatgaatataagaaagtgcgtattcagcaatcaattccttttcacggttatgaatggcctgtttgtctgcaaaatcatgcagaggctcaggggttttcttcaggcaggcaccgccataggtgcgctctatgatcccctgtttctctaattctatcaagtcacggcgaatggtcaacggtgatgtgtggaagtattcgcttaatgtctgaacttgttgctgacctgactgatgcaataattcaacgatatcatttcttcttttttcgataatatgtctgctttgtttcaatatagttcatcctcccagttaacgtaagtataacatttatatgaacaaaagtctataggagttatcgtaaaaatggagcaaattgaaaaacaaggaattatatggaaaaaaatgtatgaaataaccgatgaaatactggataacttgcataataaatgaaaatttgacaaataaacgattgacatagataggtttaagtgttattgttgaacaaagagattcataaaaataaacaaaatgttcataaaaataaataaatgaacatttaaacaaagaattaaaaaaaggtatggggttgcctatgatctattcattgattattgatgcgggtacttccagcatcagggggattatttttgataccgaccatcagattgtacatattgcatcacagcgatattttatggatgtatcagaagatggaactgcccttcagaaagcggagagctatcaggtatgtcttgagaagatgatgcaggactgtgcagaatgggcggaaggtagaaagggaaagattcatagaattgctttaacggcgggacgttcttctgttctgccggtggatgaaaagggagatccgttagggccgattatgatgtggtatgataaacggccgcaggatatctgtgacagattaaatgctgattatggtgatgagatttaccgggtgacaggaatgtatgccagaccgatgttttcagcaccgaagatgcggtggctgaaagagaattatccggctgtatatgaacagagtcataagctggcgggtattcaggattatttgatttttctgctgacaggcgagtgggtcacagatttgacatttgccagcagaaccaatttgctggatttaaacagcaattgctggtcagaacggatgcttgaaatatttggtgttgatgaacagaagttgtgccgactggtggagccggggtcagaagtgggggtattgaaagaatcctggcagaacagaggttttgacaggaaaacgaagatttatacagcagggggagaccagcagtgttcggccatcggtcagggacttttggcttcagggaaaataggcattaataacggaacggcttcctatgtggcagtttgcagccgcagtcggctcgaggataaggaaaaagtcattcatgtcaacaaaggagcagcccttggaacctggataatggaagccagtaatatgggaaccggttcagtctatgactggatgagaaagatactgtttgactttgaagaagatactgtttctatagaagcaatgaatgaggcattaaataacagtaccgccggtgcggatggcattatagcatggccatatctggcaggcaaagggatgcctgattgggatagccataaagccggaggccttttgaatctgaagctgtcttcaacaaaagaaaatatcgccagagcatttttggaagcgcttgtttttgaaatcgcagactgttatcgacggatagaaagaatggttggcagaccagaggtgatacaggtttcaggaggactttcgaagatgcctttgtttaaccagctgttggcagatgtcctggacaggaaactggtaacggtatcctgtaaggaaacgacaggaatcggtgcttatatttcgatgctgttgggatgtggagaaattgaagaaaaagatatttcagatattttgattcaggagaaaacggctgtctatacacctgagatagaacaggtgactttatatacggcactacagaagaaacgcagacagatagaagagcgcatgccgtttgaagcaatcagtgagtaaatataagtgatgattgaacacttatatttatcaataaaaaacaaaacaaggaggagtacaatgaaaaagggtatgaaaaagattttgtcagtagcgattgtattagcaatgacaatgagccttgcagcctgtggtgggggaacaaaggaaacacagggacaggcttcctcagaaaccgctgcagcatccggtgaaagtgccggaacagaagccggagagacctctgttggtgaaatcaagaggggcggcacattaacattaagaagaacaggaacaacaccaatcaatccgacacaggtcattgcacctgcaggagatatgatgacctactcactgttctttgagacactgacatggtttaatgaagaggattacagtgcacaaccgtctctggcagagagttgggagtggtccgatgattctctgtcactgacaatgaaactgaaagagggcgtcaatttctttgacggcactccggtcaatgcagaagcagttaagacaactatggaatactacatggatccggatactgcccatgcacaggcaagttatctggccaatgttgataatgtagaagttgtggatgactatacagttaaattcaatttcttagcaccggattcgagttttctgactgccatggcacagccaatcggtattattcttgctccggcagccattgagaaattcaaatcaactaatgatcctgaagtgtttgcccgtgaaggtggatgcggacctttcaaacttagtgagttcctggatggtgaaagcctgacagcagtaaagaatgaaaattattacaagatgggtgccgatggacaggctctgccatatcttgacagtgttgttgtacagattattggtgatgaggctgttatggctgctaatatggaaagcggcgatattgatgcggtggacttcttctacgatcagaattacattgatgaatttaacgcaaatgatgatatcgttctttacaagatcgccagtcagacacagtatatcctttacatgaacatgcagaaagaaccatttgacaatgtaaaggtcagagaagcactttgttatgcttttgatagagatgaatgcattgatgttttattaaatggtgacggcttcaaaacaccaaccatcgttcttcctacacagacattctacagagacggcaagatttatgactacaatccggaaaaatcaaaagaactgcttaaagaagctggttatccggacggtgtaaccattgagttttattatggtacatatggcagcaacaaagatattgcagaattacttcagtctcaggcagcagcagccggattcaatctgacactctgtccgacagatggtgccagcgttaaacagctctgggcttcttataatgaagatacacctgcaggcattcgtatgaatgaacttggacatccaaagccatcaccatatattcagatggattacacatttggtcagaacgcacttcagaattcctctaaatggttcagcgacgatcttgctgcattactgaaagaaatcagccagacaacagatgagacagcacagaatgaaaaactgacacagcttcaggaaatggttgaacaggaaatcccaatcgtttcactttatacagcttacaaattcagtgcatatcgtacatgggttgaaggcctgaagtacaacggtgaaggtacaatgatcttcacagaagcatggttaaacaaataatgatttaaaaatgtaactgttatggcagatggagagggaaccgttgttttgggcggttcccggctcctgaagcggaccggcagaaaagtatgatactccggtcaatttgctggaaaggggcggaataattaatggtaagtgccattgtaaaaaagattttatggtcgattcctttgctgctgctggtaagtatgattatgtttggtgtcatacatatgttgccgggcaacgcagcgcttgtaatgcttggtgatgcgggaggatctgctgaacaggtacagaagttggaagaatcaatgggattgacagacccattatatgttcagtattttcactggatttcaaattttgtcaaaggggatatggggacttcttatttgacgtcacaacctgtagctaaaagaattgttgagcgtttgccggtaacgctggaattgattgtctgttccgttgttcttgcagttatcataggtatcccaattggtattctatgtgcagtcaagagaaataaactggtggattatattatgagtactattgccatgattggtgtggcgatgccgcagttctggctgggtattctgtttgtattgttattttcagtcgatttagggtggctgcctgcatcaggctatgtcacatttgctactaatccgatgcgacatattcaatctatgattatgccatcgatcactttggcactgtctttggcggctccgattattcgtcagacccgaagtgctatgctggatacattgagtcaggattatattatgacagcgaaggcaaaggggcagaatagtgtcggtatttttgtcaaacatgctctgaggaatgccttggtacctgttattacagccattacatcccagattaacggtatgattggcggtgttttcgttattgaaacattgttcctgatgcctggtatgggtaaatcaatggtagatgcgattttccagcgagattatccaattatcatgggtattgccatggtggttgtttcctgtattgtcctcatcaatctgattacggatattatttacatttttattgacccgagaatcagtttggattcgaaataatttcggaaaggtatggtgagaggatggatatttttaaaaagttaaaaaagagaaaaacagcttttatcagcttgattatattgggaatactggtctttctggctctggtgggcaataccatattgggcattgacccctttgagacaaattcaaagatacgattgctggcaccgagaatgggacatattctcggaacggacaaccttggcagagatgttctggccagagttatttacggtattcgtatttcattggcaattagtcttgtttcggtggcttttgccttaattgtcggaacggccatcggtacaatttccggttatgtaggcggaaaagtggattctgttcttgtactgattattgaagcggtctgtgcatttccgacagtccttctgggacttcttcttgcaacagtgctgggctcaggcatgacgaatattatgctggctattggtatttcaaatgtaccgtatttcgcaagactggcaagaagtatggcgatttctattcgcggcagagagtatatagaaagtgctgttacaacaggactcaatcattttgaaattattacccgttatgtgctgccaaatatgagttccgtcattatcgttcagacgtctttaagtgcagcgtcagcgttaattacagaatcaaccttgagtttcatgggcgtcggtgtacagccgccggcagcaagtctaggtgtacttcttcgagacggatatgattatatcagcaaggcctcatggctcagtatttttccgggtattgcaattcttttgacggtgattgctctgaatttcctgggtgacggtcttagagatgcactggatgtaaaaatcagagtagataactaacagaaaggaggacataacgatgagtgaacagcttgttgaggttaaagacttgaaagtaacttattatcagaatggtgtggaaacaccggttgtgcgtaatgtctcctttgaaataaagaaaaatgagacgctgggtttggtaggtgaatccggttcgggaaaaagtgtgacatcgaaagcaattatgcgtctgattgcagaaccgcctggcaaaattgccaatggagaaatactgtttgaaggaaaaaatcttcttaaaatgaaggaaaagcagatgcagaaggtgagaggaaaagatattgccatgatttttcaggaaccaatgacatccttgaatcctttatatacatgcggaagtcagattgcagaggcaattcttttacataataaatgcagcaagcaggaagcatgggagagagccgtagagattttgaagatggtaggtgtgccgtcacctgaaaagagagcacagtcttatccgcatgaattatccggcggtatgcgtcagcgtgtcatgatagctattgcccttagctgcaatccgagacttttgattgcagatgaaccaacaacagctctggatccgacgattcaggcccagattttgaaattgattcatgatatgcagaaagaaaaggatatgtccgtactacttatcacgcatgatatgggtattgtggcagaaaactgtgacagagtggcggttatgtatgccggtcagatacttgaaattgcagatgtgaagacaattttcggcaatccggcgcatccgtataccattggacttttgaaagctattccgaagctggatgaaaaggtggatcgtctttacaatattcgtggcatggtgccaagatttaatgagttgccgaatggatgcacttttggtccgcgatgtgatttttgtgataaaaaatgtgaagaagaggcaccacaactggtgaatatgggagatggccatctggtcagatgccattatgccggttatctgcctgaaagggggatttgattcaatggaaaaactgctggaagtcagacatttgaaaaaatatttccctgttaaaaaaggatttattaaaagaatagtgggcagtgtcaaagctacggatgatgtgacttttgatatctataaaggcgaaacttttgggctcgtaggagaatccggatgtggaaaaacaacggtgggcaaattaattttgcagctgcataaagcagattctggagaaatcctttttgaaggtacagatttaacaaaactgtccaagagtgaacttcagaaataccgaaaagatatccagattatttttcaggatccatacggttcattgaatgccaaaatgaaggtggggacgattcttgctgaaggcattaaaaaacacaaactgctgccgccggatcagattcagccgcgagtgctggaactgctgaaactggtggggctgcatgagagtgatgttaacaagtatcctcatgagttttcaggaggacagcggcagagaattgttgtagccagagcattgtcatttaacccgaaattgattgtctgtgatgagccggtatcggcattggatgtatctgtacaggcacaggttttgaatttactggaagatctccagaaagaactgggaatttcatatttgtttattgcccacggcatggcggttgtccgccatatttctcatagagtgggtgttatgtatctcggaaaaatggttgagattgcagaaacagatgaattgtttgagcattgtgggcatccttacacacaggctctgttgtcctctgtgccggtagcaaatcctttgcataagaaaaaccagattatgctggagggagaagtgccgaatccaattaatccgccgacgggatgtcgatttcatccgagatgccgtttcgcctgtgacaaatgtaaacaggaagaaccgcagttgagaaaaattgcccaggggcatgtggtagcctgtcattatcctgaaaaggtatatggaaactaatgaactaaaatttaaaaggaagtgctgaaaatgggaaaaagcgaagacctgatgaaaggaattgaccgtgtcggtattttcgaacggatgaaagattatgaagatatggcatttgagacccgggcaattgatgttggcaatgacagcggacgttcggcgatgccgatttatgcttccgtcaccggagatacttatcagagacatggggatccttcaagagatgctatttctacatgcatcgcatctttagaaggtatgaattactgcctggtgacaggcagcggtgtatcagcaatgacactgccgatgctggctttattgaaaaagggtgacagaattatctgtcataaagatttgtacatatggacgtatttctttgtgagggaagatttgccgagattatgtgatattcaggtagatatggtggattttactgatttaaatgcccttgaagcggcattgaaaaaagaaccggcaaggatggtggtatttgagactattgccaatccgctacttcatgtggccgatatgaaagcctgctgtgaactggcacatcaatacggtgcactggccctggtggataatacatttgcctcgccttatctttgtagaccggcagagcttggtgccgatattgtggcagagagtctgacaaaatatatcaacggccacggagatgcccttggtggttctatttccaccaacagccatgcgatttattatgaactgcagcgaatgatgggtgttgtggggtgctgtgcaagtccatttaattctttccttattttaagaggggttcagacactgggaatccgtatggaaagacattgtgacaatgcggaaaagttggtggaatacttgagaacaaagccgtttgttctggatttaacttatcccggaatgcaagaacacccgcagcatgagatagcagcatgtcagttaaagcgttttggcggtgtattatgtttcagactggatacagatcatgaaacattgtatgagaaattcctgccggagctgaaactgtttaaacactgggtaagtcttggcgagggacattcattaatcagtccgaaggatgaggacaaggaaaaaggaattccggcagattttattcgtgtagcggtgggtcttgaaaattgtgatgatctgatttgtgacctggaaagagcatttaaacgtatatttggataatacatgtaaaggggagcctatgtctaaaattgatgaaattacaagagaaagctggattatgagtacatttcctgaatggggaacatggctcaatgaggaaattgaacaggaagttgtggcaccgggaaacgtggccatgtggtggctgggatgtacaggtatctggattaaaacaccgcaggactgcaatatttcagtagatttgtggtgcggtaacggcaaaagaacccatggtgacggtaaaatgaaagtcggacatcagatggcgaatatgtgcggtgccagaatgatgcagccaaatctaagagctatcccttttgtgatagatcctttcgaaataaaaaaagttgatgcggttctggcaacccattatcatcaggatcatatgagtgcagaatatgcttctcatgtcatcaaaagtaatctgacaacatttgatgcagagggcaaagaaattcctgttccatttatcggtccaaagaaatcagtggaattgtggcagaaatggggtgttcctgcggacagatgcatcaccgtcaaaccgggagatgtgattaagattaaagatttggaaatcattgcattagattcttttgacagaacctgtattgttacaacagattctcaggggcctgacagagaagaactgacaggtatctgtccaacggatatggatgataaggcagtgaattatctgattaaaacaccggggggcaatatttatcacagtggagattctcattattctatttattttgcaaaacacggaaaggattatgatatagatgttgcattcggctcttatggagaaaatccaatcggtatgcaggataaaatgacttcatgtgacattcttcgtatggctgaagcattgagatgtaaagtagtcattccgattcattatgatgtgtggaccaactttatggcagatgtcaatgaaatccgggtactttatgatatgaagaaggacagactggattatcagttccatccatttttctgggaagtgggcggcaaatatatttatcctcaggataaggacaaacgggcttatcatcatcgcagaggttttgaggactgctttgaggcgcctcagaatattccgtatagatcctgtctgtaatggaggcatttatggataaaaaatattgtctgggtctttatgagaaggccatgccaggaaatctgaccatggcggagaaactgacagccgccagggaagccggctatgattatctggaaatgagtgtggatgagactgacgaaaagctggctcggttgaatatgagccgtgaggagagaaaagaactgacacttttaatggaaaagaccgggatgccgattcgttccatgtgtctgagcggccatcgcagatattctcttggaagcgccgagggggcagagcagagtctgcgcatcatggaaaaagcaattgaactggcggatgatttgggtattcggattatccagttggctggatacgatgtttattacgaatcttctacatatgatacaaaaaaacgatttctggataatcttcgcaaagcagcggcaatggcagaaaagaccggcgttctgttgggttttgagactatggaaacggaatttatgaatacagtagaaaaggccatgaaatatgtttgcctggtggattctccttatttgcagatttatccggatatcggcaatctgacaaatgcagctgtgacgtataaacaggatatttatgatgacatggcacttgggaaaggacatttgattgcgatgcatctgaaagaaactgtaccgggaaaattccgggaaattccttttggagaaggacatgttgattttgaaaaagcagtcagaaaagcctgggagttaaatatcagacgctatgtaacggaattctggtatacaggcaatttacaatggaaggaagaactgcttcatacatgtcagaaatttaatgaactgctggaagaaatttctaacagttagtttttgggaaggataagattctatgaaagtagaaaagaaaatcatttcaaatttgacgaaatgttattcgattgcgccgctgcattatcatgagcaggattatatccttgtggcggctgaaaaacaggatccatgccttttatttgattgtgaaggcaatcaggtagacaaggtatgggacggacccggtggaacaatgagtatggttcaggtgccgggaacggatggccagtttctggcaacgcaccgtttttattcgccgaatgattcaaaagaggcggaaattgttattgtgacaccaaaagcaaagggagactgggaggtcagaacgctggtcaaattgccttttgttcaccgttttgatattctggagagaaacggtgtccattatctcattgcctgtgcattgaaatccggtcatgagtacaaagaggattggtccatgccgggaaaagtttatgctgccgttttgccggaggatttaagcggatttgatgaaaatcatcagctgaaattggaagtgctgaaggatgagatgctgaaaaatcacggctattacaggataccggaacaggataaagatacctgcgtgatttctgcagactgcggcgtctatctttttacaccgccggcaaaaccgaatgaaccatgggagattaaacagttgatagatacgcctgccagtgatgcggtccttgtggatttagatgaggatggggaaaaagagctggtggttttatctccttttcacggtgatgtgatcagtatttataaaaagacagatagtgtttatcagaaagtttatgagtatgaaaagacagctgaatttactcatgccatttacggcggtatgctctgcggacatccggctgcagtcatcgggcaccgaaagggtgaacgaaatctaattgcattcagttggaataaagcggaaaagaaataccagtcagaaattatcgacagagactgcggaccggccaatgtttttcattatatgaaggacggtgctgacagactgatttctgccaacagagaaatcgacgaggttgcactctatacactgtcataatctcaatataaaaatatgccaataacttctttaacttcataaaccctcccagagaaattatatgctttgggaggtctctttatttatacgcttgtttatgcaggaaataagatgatgaaaattcaacggaaaaatagtggaatggatatgcttcgtggatcgctgtcaggaaatattatccgatttgcgctgccccttgcgggcagcagtatgctacagcagctttttaatgcggcggatacagcgattgtcggcagatttgacggcagacaggcactggcagcggtgggcagtaataccatgattatcagtctttttgtaaacatgtttgtaggcttgtctatcggcgccaatgttgtgattgccaaatatgtcggacaaaggcaggaagaaaagataaaaaagtcggtgcatacggttatgtttctggcagtactcagcggactgtttcttcttgtttttgggcagatgacagcagaaaagatattgacgttgatgcagaccccggaagatgtgatggcgcaagcggtgctctatctgaaaatttattgccttggaatgccatttatgatggtttataattttggggcggcagtgcttcgatgcaaaggtgatacaagatgtcctttgtatgcgctgattttatcaggaatcttgaatgtgggcctgaatctactctttgtcgtagctttcaaaatgggtgtagccggagttggaatagcgacggttattgccaatggtgtaagcggaagttttgtgtgctgctttctgatgcaggaaaaaggatcgatgcatttttctgtaaaggccatgcagttggataaaaaatatctgaaagaagtattgcaggtaggaataccggcaggtatacagggaatgtgtttttcggttgcaaatgtgtgtatacaatctgctgtcaactgctttggggcggaaggaagtgccggcttttccattgctttaacgtttgaaagtttgacctattacatttcaaatgctttcggacaggcggcggtgacttttaccagtcaaaattacagcgtcggcaatataaaaaggtgcagacagatttttaattggtgccttttgcttggaggtgtattgtgtgaaagcatcagtttgctttttgtggcaggacatcgatggttgataccgttttttacatcggatgccggggctgctgcttatgcacttatcagaatgcagcgagtggtggcttttaatggtatgacggccggatatgaagtcggaagcggacttctaagagcaatggggcattctctgcaaccggcattactggtggtagtcggatgttgcggctttcgtattttgtggattttaaccgcttttcgccggattgggacctttgaaatattgatgaatgcctatcctttatcgtggcttgtaacggatatacttatttttgttacatataaatattacataactattagcactcattaaaaatgagtgctaattttttcttgacatttagaaataaaggtattacaatacttgttagcagaagacgctggtgactgccaatagttggcattttattatattattgtatagaacaggagtgttgaatatgtcagaagttaaacaggaacagggtaatttatcgattaacagtgagaatttgttcccaattattaagaaatggctgtattcagaccatgatatatttttcagagagttaatctccaatggctgtgatgcagtgacaaaggtacagaagcttgaagtgatgggtgagtaccagcttcaggaaggtgagaagttccgtgtggatgtcattgtgaatccggaagagaagacattgaagtttatcgataatggtatcggtatgacagcagatgaagtgaaagagtatattacacagattgctttctccggtgcgacagatttccttgagaagtacaaggacaagacaaatgaagatcagatcatcggccattttggtcttggtttctattctgcattcatggttgcagataaggttacaattgatacactgtcctatcaggaaggcgcagaaccggtattctgggaatgtgacggtgacagtgaatacagcatgagcaagggcagcagaacaacaagaggtacagagattacattgtatctgaatgaagacagctatgaattctccaatgaatatcgtgcccgtgaggtcattacaaagtactgttctttcatgcctgttgagatctacctcagcaaagaaggcggtgaacaggaatatcagaccatcgagaaggatgaacttcgtgaggatgatgtcatcgcagagacaattgtcgaagatgagaagacagaagagaaggagaatgagaacggcgagaaagaaaccgttgttgtatctcctcgtaaggaaagatacaagatcaataagcgtccttcactgatgaatgatatccatccattgtggacaaagcatccgaatgactgtacagatgaagaatacaaggaattttacagaagtgtcttccatgattataaggaacctttattctggatccatctgaatatggattatccgtttaacctgaagggtattctgtactttcctaagatcaacatggaatatgaatccattgaaggtacaattaaactgtacaacaatcaggtatttatcgcagataatatcaaggaggttattcctgaattcctgatgctcttaaagggtgtcatcgattgtccggatctgcctttgaacgtttcaagatctgcactgcagaatgatggttttgttaagaagatttccgattatattacgaagaaggttgcagacaagctctccggtatgtgcaagacagatagagaaagctatgagaaatattgggatgatattaatccattcatcaagttcggctgcatcaaggatgacaagttcaacgagaagatgaaggattacatcatttacaaggatcttgatggcaagtatatttcactggatgaatatcttgaggctgctaaggataaacatgagaatcaggtattctatgtcacagatgaactgcagcagtcacagtatatcaacatgttcaaggaacagggactgaatgcggttatcctgaagaatccaatcgatcagccattcatcagccgtcttgaagaggcaatgaaggacaagaatgtgaagttcagacgtattgatacagatctggcggacgtattcaaagaagcagccagtgaagatgacaagaaggttcttgaagaggatcagacaaagctgacagatatcttcaagaaagctcttggtgtagaagaactggatgtgaaggttgagaaactgaagaatgcagacacatcagccatgattacattatccgaggatatgcgtcgtatgcaggatatgatgaagatgtacggcatgagtcagggtcagatgggcacagaaggccagacccttgtactgaatgcgaataatgcactggtacagtatgtactgaacaatccggaaggcgagcatgtcaatatgttctgtcagcagatttatgatctggcattattaagccactgcccattaagtgcagaagccatgacgaaatttgttgcaagaagcaatgaaattctgaaactccttgcaaaataaagtgaatgtataatttttcaaattgattgaatttttatgcgttacaatgatgaataactaattagataatgtgataaataagcagcaaattagcacaacactatactgaagcataaatataagaagaaatccgttccggaaaaagcaaaccggaacggattttttgtaatgttttataatatgtaacatttaccttttatgaaaacatttcacacagaatgcggacaacaagggtccttggcaggagaaccggaagaccggtaacttcctgaatctgatgtttcatttccatggtgaagcccatacagtcagtacagataaaggccagatttttgcctttgaagaaggaggcagcctcgacgactttatcaaaatccagataaggtgaagcggaagttacttctacagggatgccgcttttgccccaggtatgataagcctgctccacctgatccggttccggaacaaggatgccgattttttgattgcccgccagtttagcagcaatagcatggaaaagcggctgaggttcaatgaaaagcacctggtgtctgaattccggaaaaacgccggtacagaacaggataatcgctgatacgccttctgcttctgcctgatcaatcttcttctggacaaggggacggataaaacgttctgtaaatttggcctgcctgccatcgcgcatgcgagagacgagcacttcatcatcttcagatggtgcaaactgggacatgacttcttcataggtcatatcatctaaagcgccatattctgtcaatgtcatataatccggcagcagcggcaggatatctctggtgatatccgtgcggggtgcctgtccgatggtaattgcaccgattttgatctgtttcatgtaatcagtccttttatttatccttgccgaaagtctggaatacgttcattggtccgtataattcaatcagatgatcgtattctttctgatcatagaaagaaatgatgccgtcgccataacctttggcaacttcgacagcaaatcttgcagcggattcaacatcttcaaaatggcatgcacctgtagcgcagccggcgactggctgttctgttgtaatggcaacacctacaacaggggcatttgttgaagtcgcaggctgaagaatactgttcagatggtgcagatcattgccgtaaggggtgatatcctgctgtgcaacagggaaaatagcaggcagcttgcctgtgacacgtgtcataacgtccatcaggtcattgctgacttcaagaatatagccttctttgatggtcggagaaagtgcgaaaccgtttaaattgatgacacggtttccttttgttgtatcaatagaaagaatggcatccatatccggaagaacttccttctcattgtttgttgtcatgtcgattggtgaacccatgaatggtacaggaaaatgttcctgagttggtgcatccgggcagatatgggttgcgatgatgacatcacctttcataatgtcacctttggtattcatttctgtcagtttaagaccggcagccagtgcggccaatgcaccatcgccatctgaaacgaagcctgttacttcaggtcttgcaccaagcccgccaagacgtccaatgattccgagagtaggagcggagcctccgatagattttccttcgctacctttaatgagaattgttacacaatctgtgtcaccttcatcacctttgacattttctacagtaacttctacgttacctctttccttaaaaagatttgtgactgttgtgccgttggcagcaggagtgtcaagcagatcaaacagttcgataacctgtcttaataacatggttaattgcctccttagatataaaatgatatatggcatatttgcacattacattcagtttatagcaaaatgtgatatgggtcaatagaatttgaaaggaaatcctctcttttaacagattaaagtgacgaatgaataaattttttgaataaaaatgtaaaaggacttgcagaattgaaaatagaatagtataatacgtctagtgcaaacaaatgtccatcttaaaaagagggtattaaggagctgaaagatatgcagaagacaattttatttgaagcgaaagcgatagaggatgaactgattgcacatcgcaggcatcttcatcagaatccggagctggggtttgatctcccggagacaacagcttatgtgatgcagcagttaagagaatatggatatgcaccaaagacggtcggaaaagcaggtatcagtgcagtgatcggccctgatggcgggaagacttttttgattcgcggcgatatggatgcacttccgatgaaggaagagacaggattgccgttttcttctatcaatgggaaaatgcatgcctgcggacatgattttcatacatcggcccttcttggagcagcaaagcttctgaaagcccatgagagtgagttgaaggggcaggtcaaattgatgtttcagccggcagaggagattatggatggagccaacgacatgattgccgccggtattctggagaatcctcatgttgatgcggctatggcgatgcatgtactgcatgacaaccttggcaaagcaggttatacgagaggaacaggctgtggttccagtgatgtctttacgattaaagtcaagggcgtcggcggacacggtgcagcaccccacctaaacgtagatccaattaatgtagcctgtcatatacagttggctcttcagacaattaacagcagagaaatcaatccaaatgaactgattgtcctgacaatctgttccatccatggaggaacggcagctaatattatgccggacgaggcagtgatgcagggaacaatccgtacaatgaacatggatgtcaaggcctttgccagacagagactgattgatatctgcgaaggtgtatgtaagacattccgtgcggaatgtgaaattgatttcattggagatggtattccgccaatgtataatgatgatcagcttttaacggataccatccgttatattgatgatctgctcggtgaaagtacggcacagccgatcgagcgaatgacggggtccgaagatttttcggcactttccgttaaggttccatctgtcctgtactggtttggtacgggaagcacggaagaaggctataattatggtgttcacgattgcagggttacttttaatgaagaagcaatccacagaatggctgctgtgtatacagaatgtgccatgagatggctggaggaacaccagtagttataattttttcacgaggaggaaaagagatgaaaaaaagaattttagcacttgcacttgttgcatctatgtgcgtttctcttgcagcctgcggtaattctggttctaaagaaacagaaggtacagcagcaaacagttcttcagctgcagcagagacaacagcatccggcgagacagaagcagaaggagatccagtcaaaggtggtacactgacaatttccttatccgcttcaccaagtaaactggatccaatccactacactggtaattatgaaagcgagattatcaaaaatgtctgtgatactctgatcgagtacaacaaggatttatctgaatatgtaccttctctggcaacagactggacagtttctgatgatggtatgacatatgtattcaatatccgtcagggtgttaaattccagaaaggaaagtatcaggatggtcgtgagatgacagcggaagatgttgcttactcactgaaccgttcagctgaacattcagacagcaaccgtttgtccatgcttgacaaagcagaagcaacaggcgattatgaagtgacatgtacactgaaaacagcgaactcttctttcctgacagcattaacagatgggggcaacgcaatcgttcctaaggaagaagttgaaggctggggcgatgactttggcagccatttagttggtacaggtcctttctctctggaatcttttcagcttgaccagcaggcagttctgaagaagaacgctgattactggttggcagagccaaatcttgatgaagttattttcaaggttatcacagactctacacaggcagccaatgcacttcagacaggtgagcttgatgtcgccatggatctgaagggtgaatctgttcagaaagttaaggataatgcagatctgactctgcttgagacaccgggacttcatgttgcatacgtttactttaacatggaacagggacctacagctgatatcaaagtcagaaaagcgctgattgaagcagtcaatgtagaagaaatggttgcttccctgtataaatacggcgaagcacagagtgcaagccttccactgcctccgggctcatggggctacgatgcttctcttgaaagcaaagttccaggttatgatccagaagatgccaaagcccttcttgcagaagctggttacggtgacggcctgacacttgatctttacatcagtgatacagaagcaagacagaacatggctgtccttcttcaggcttactgggcacaggttggcgttacattaaacattcatgcatctgaatggggcacattctcagaagttgcaatgtccaacaacgcagatgtctatggtatgtcctggacatggtatccggatccatacttcttcctgaacaaactcttctcaacagatgagtttggcggtatcggtaatggtcagcattactccaacgcacaggttgatgaattacttcagaaagcgctggaagcaacagatcaggctgatcgtgcagattactataaacaggcgcttgctctgatcgtagatgatcttccaggtatcttctatgcaaatgaaaacgttatctacggtgttaacggccgtgttcatgattttattcagagagcagataatacagtcagatttgttacagcagaaaacaatgtatgggtaacagattaagaaactcgtaagagagttttgaatatgagtgtttgaaagcggggcgcggcgagttcgcgcctctctttttaagaagtccgcagtggattgcggacaactgaaatgaaatggtggtgtattaagtaagtgttaaaaacaattctcaaacgtattttacaaagtattccaacactcctcattgttattacgattactttcgttttgacacgaatgattccgggtaatccggcacgtacaatcctcggtccgcaggcttctgcccaggatattgccgagatggagattaagcttggattaaataagagcaagcttgaacagtatgcagattatatgattggtattctgcatggagattttggtacatcttatgtctataatcgtccggttacaagcctgattgcagaaagaattccaaatacgctggtcattactctgaccagtttggtcattgctatttttattggtgttggcattggtgttttatccgcgataaaacagtattcgattttagattatatttttatgattcttgcactggttggtgtgtccatgccgattttctggctgggcctgatgcttgtcaacctgttttcagtacagcttggatggctgcctgccctgggcatgggctctatgagcaaaggtatcggagatgtgatctcccatatggtactgccatgtttctgtctggcaacaatccctaccgcaacattcgccagaataacccgctccagtatgctggaggttatacatagtgattccatcaaagcacttcgtgcccgtggtatcaaagagagcagcattatctggaagcatgcattaaaaaatgcattgcctccaattgtcacagttcttggtcttcagctggccagcgcttttacaggtgccattttgacagagagtatcttttcatggcctggtatgggtacgatgatcgtatccgccatcgataaccgagattatatgctgattcagggaacggtcctttttattgccgttgtctttgtcgttgtcaatttactggtagacgtggtttatatgattattaatccacgtgtcagctatgattcgaaagggggtaattaaatggcagatacaacaaaaacgacatccgcggatgcactcggcctggatgctcaggcagaaatgctcaaaacagaacgtcgtgccaataatgtctggaacaaattaaaacgaaacaaaacagccatgatcggtcttgtgattgttgttgtcatggttttcatcgccgtttttgcacctgtccttgcaccttatgatccggatgaaattcatccactggatgcatttctgaaacctttttcagaaggtcatattttcggaacagaccagttcggtcgtgatcttctgtcccgtgtgatttacggtgccagagtttcactgattgttgctgcaggcggtacaatcgttggcggtatcattggtgtgctgcttggcctgatcgcaggtttcatgggcggtatcgtggattctattatcatgcgtatcatggatggtttcctttcattcccattcgttttgttatccattattctgatgacagtactgggacagggactgatcaatgttatcattgccatcggtatcggtaatattccaagctttgcacgtgtggttcgtggtgaagtacatattgttaaaaatgaagaatactgcaatgcctgtcgtgtgatcggtgtttccaacacaagacttctgtttacacatatcctcccgaatgcaatttctccgatcatcgtttatgccacattaaatgtagcaagtgcgattatctctgaggcagcattgagtttccttggtcttggtattgccgcaccgacagcttcatggggaagcatcctgcgtgaaggaaagagcagtctgacaaccgcaccgtttgtggcaacaatctccggtgcatttatcttgatcactgtacttggctttaaccttttcggtgatggtatccgcgacgtgctggatcctaagatgaaacagtaattgtgcggagaaggtcttcgcagaccctcagtttgaataaaggatgaatgaaatggaaaataaacagacagttcaaaaaagaatagaagaaatcatgccggatctgagagaactttcagattatctctggcatcatccagaatacagttttcatgagtttaaagcatgcaaagccatgtctgaacttttgagaaaatatggttttcaggtagaaacaggtgtcggaggcattgagacaagtgtaaaagcggtttatgacagcggaaaacccggactgaatgtagggtttgttggtgaatttgatgcttttccgggcatgggacatgcctgcggacataatctgatgtgtgccattgcttgcggtgcgggaattggtctgaaatctgtgattgatacattaggcggtaaaattactgttctcgggacacctgcagaggaaggcggcggaggaaagatcactatgctggaaaacggcgcttttgaaggccttgattttgcgatgctgactcacgcctcatcagatacatgtgtcaatgatatttcctattcaagaacagatatccgcgtacattattatggcaaaacagcgcatgcagccacatggccggaagagggaatcagcgcattgacgcctgttcttgaactgtttaatattgtcaatgccatgcgtcttgaaattggagacaagggtaagattcttggcattatccgtgacggcggcgatcaggctatttttataccggatcattgttctgcggagtttaccattcggtcattcagtatgaaatataaatgggaattattccatcgcttcatcaaaatctgtgagaatgtggcagcaattacgggaacgcgttttgaatatgagatgattgatttatcttatgaggatattcgcaataatcctgttctggaggatacactggcagagaatttcaaagttcttggtgaagaactgtgtccgagattaaaggaacagggaattggctgtacggatatggggaatgtgacccatgcacttccgggcatccaggcctatatccggcttcgaccgggactcagggttcatacaccggaatttgaggaagcaacaggaagtcccgatggatacagagccatcgaggcggcagcgaagggtatggctatgactgcggtggatatcctttcagattcgtcgaagatggaagcggtgcgaaaagcattcagtgaaatgaaagcacaatacgagtaatcgaggtgatacgatgagtgaaaatatattgacagtcaaagatttaaagacttacttttatacagccagcggtattgcgaaggcggtagatggtgtaagttttaatatagcaaaaggcgagaccatgggtatcgttggtgagtcaggttccggtaagagtgtgacttccagctctattatccgtcttctcccgccaagaacaggcaagattgtcggaggttccattgaatttgaaggcaaagatgttctggcattaagcaaaaaagagttaaatgatttcagaggtaaggatatcgctgttattttccaggatccgatgacatcccttgacccggttttcaagattggcaagcagatgacagaaatgatcatggctcatcagaatgtgacgaaagatgaagcctggaaaatggctgttgaggcattgagtaaagttgggattcctgaacctgagaaacgtatgaattcatacccatatgaactttcaggcggtatgtgtcagcgtgtgatcattgccatggcagtttgctgtaaaccaaaactgatcattgccgatgagccgacgacggctttggatgtaaccgttcaggcacaggttttggaacttctgaaagaacttcagagagatatggatacagccattcttctgattacacataacctgggcgttgtatgggaaatgtgtgataaagtcatggttatgtatgccggcaatacagtggaatttacagatacaaagacactttacagcaatccgcgtcatccatatacatggggacttctggattccatgccgaaattgtctgatgaatctaagggtgaattaaagactattccaggtacaccgcctgaccttcgtctgacaggcaaatgctgtaatttctataacagatgtccgtatgtgacagaagcatgtacacagtctgtaccacctcttgttgaagtggaaccgggacactttgtagcctgtcacagacagaatctgaccaataaactggagaaaggagagggcttaaaggatgagtaatgaaaagaaagttttgatgaaaattgagcatctgaccaaggaatttgagatcaaaagcaaaaagcttggcggtaaacctcagattctccatgcgttaaacgatgtgtctgtagatatttatgaaggtgagacattgggtgtcatcggcgaatccggttgcggtaaatcaacattcggtcgtacattgatccagctgcacaaggcaaccgccggttctgtgacttttgacggcaaagaccttttttcactgaaaggggcagaacttaagaaagccaagaaggatgtccagatggttttccaggatccttactcttcattggatccgagaaagacagccggcaaattgatcgaggaaccgctgatcgtgcataaactgatttccgataaaaatgagcgtgaaaaacgtgttctggaactgatgagagaggttggtcttgatattcagcacgtccaccgtttccctcatgaattttcaggtggtcaaagacagcgtatcaatgtggccagagcgttggccatgaatccgaaggtaattgtctgtgatgagccggtttctgcgttggacgtatccattcaggcacaggtgctgaatctgttcaacagactgcagcagcagtacaatctgacatatatctttatttcccatgacctgggtgttatcaagcatgtcagtgacagaattgccattatgtacctgggaagaattgtagaattatgtgaagcggatgccatttatgagaatccgctgcatccgtatacgaaggcattattgtccgcgattccgccggtttcaccttttgcaaaaaaagaacgtattgtcctaaaaggcgatattccaagcccgatcggcgatcagattggatgtccgttagctggcagatgcccgaactgcatggataggtgcagaaaggaaatccctaagttaaaggatgctggtgatggtcaccaggttgcatgtttcttatatgagtaaaatacagcagttccaaaatctgattttgagcaactgcagaaaatgaaaagaggatgaatttcaatgaacaatgtaacaagaaatgatgtttgggaactggctaaaagcagaaggaatgatcttgtcaaactggcttcagatctgattcgtatcccgagtgagaatcctgtaggaacacagagagatgtcattgattttgtagaaaagtatctgtctgatgcaggtatcagctatgaagaagtttcctgtaatcctgatcatccgaatgtacttgccaaaatgggcagcgatgacggcttcagtgtgattttgaacggacatgtggatgttgtccctgccggcgatcgctctcagtgggattatgatccatttggtggcgaaattacagacaagagaatccttggccgcggcgcttctgatatgaaagccggtgtggcaggtcttctgtttgccatgaaagtattgaaagattcaggagcagacttgaaaggtaatatccgtcttcatattgtttctgatgaagagagcggcagtgaatacggaacaacatggctttgtgaacagggttacgctgaaggagccaatgcagccattattgctgaaccgacatccaactggaccatcgaatccggccagaaaggcaacctgcatattatcttcaaatctatcggaaagtctgcgcacggaagccttggcaattacaagggtgataatgctatcctgaaactgaacaaagttctggcaaatatcgaaatgctgacaaagattgaaggtcattatccggaagatcttttacagtctctggctaattcacagatggtggcagaaaaagaactggatatgaagggtattggcaatgtcattaaccatgtatcagctaatgtaggcctgatttccggcggcacacgtccaaatatggtgccggattactgcgaggcaaccattgattgtcgtctgccttatggtgtggatcatgaagaaattgagaacacagtcaaagaaatgattaagactgccggtgtggaaggcgttgaatatgaactcctttggaagagcgaagcgaatgtcacccgtgatgactcagacatcgtacaggccatcaagaagaatgcagaggccatctggggcattactgtatatccggcatggcagtgggcttgcagcgacgcaagagaataccgtctcaagggcgtaccaaccatccagtatggcccatccaacacagaaggcatccatgcaccaaacgaaaatgtagacatcgaagacgttgtcaatgcaggacagatttatgtattgtccctgtgcgacctcctcggcgtaaaataaaagttaaatgaaacaacgataaaaagctgccagtttttaagagctggcagcttttattttacgcgagcaacgagccaaagtccgtgcttgcacgagaccttggcgactgccgcgataacttgagaaactcgcggagcgtgtttctcatagtttagatttttagttttcgaaaaatgccttagcaaaatgcgtcaaaccgatctgatcgtctttgcccatcatttcccggcttgagtgcatggccagaaggccgacaccgatatctgcggtgcgcattggcagatgggaagagatgatggaaccgatagtgccgccgccctttgtgttggagtgttttgcaaagcgctgataaggaatgttttcctgctggcacagtgcaatgagggaagccatgctctcacaatcccatgtataagactggttgctggctgttttcagaataaatccgccgttcatgatcggatagttggtgatatcctgagtgcctggataattcggatggtaggcgtgagccacatcaacagaaagcatcaggccgtctgagatatcggacatacagtcaatctgatttttgccgaaagcctgccagatcttgccgatgatcacagatggcagtgtggaatcagcaccctgtttgctgagacttccgatttcctcgttatcgaataagcagacaaggttaacgcggtcagcgttcttgctttcaacaagaccgtgaatcagagcgcatacagaagtgatatcatccagtcttggtgcggagataaattcttctgtgaaaccaaccagttcaggctgatcaagattgtacatgcaaagatcataatcaagaatatctttggcgtccacaccgatttctttggcaagcagatccatgaaagttgtatctttgttcagatattcattcagtgtgccgaggataggcagcagatgcttttggttgtcgataggagcaccgttttcgttgatggcgcgattcatatgaatagccagattcggcagataaacagcgggacgtttcagatccacaagatggctgaccggacgatcatatcggtcaccctttgtgacaacttttccggcaagggataatggtctgtcgaagaatgtatttaaaataggaccgccgtatacttctgtattcagctgcatgtagccatgggaaaaaatttccggatttggtttaattttgatggccgggaaatctgtgtgggcaccagcaatgtgaatgccattggaaaggtcacaggattcaccaattgtaaaagcgtagagggttgtatcaaaaggactgcagaaataacggccgccctttgtcagtgtccagttgtcttttatatgtaactctgtaaatccggcttctgtcagaacctgtttggtatgggcaatcacatgaaaagcggatgtgccgttctgcaggtagtgaaagagctgttcaacttcttttggtaatgtctgcatattcattctccattctgcatttgaaattataatataataggaaattttccactatttatagtaacacaattacgcaatataatcaatggatgtgaatttggtcttttcaaaagatgtttggtatgctatgatatatagtaatgaaaactatgttgaatagttgttgatagataacagcagttattttgcagtatgcgatagtggatgggcaggatagctgtgatagatgcaggaggataaataaatggcatatcatattgcagtggacagttgtacagatatgactgctgctatgaagaaggatgaacatatcacacttgtgccccttacactgaatgttggggaagataagattatagatgatgaaacttttaaccaggcggaatttttgcgaaaagtggcagaatgcccggaggcaccgtcatccgcatgtccgtcaccggatgcgtatatgcaggcttatggctataacaatgaggatgcttatgccattacactctcatcggaattaagcggttcttataatagtgcaaagcttggcgcagatcttttgaaggaagagtatccggataagaagattcatgtctttaacagtcgttctgccagtgcaggtcagacattgatcctgatgaagcttcaggaatgcctggaggctggtaaggctttttcggaagtagtcagtgaagttgagcagtatattgaggaacaggcaacattatttgttctggaatcattggagacattgagaaagaatggccgtttatcaggtcttaaggcgacattggtcaatgtactgaatatcaagcctgtcatgggttctaccccggaaggcacgatccagcagctggatatgggccgtggcatgaagaaggcactgatgaagatggtagagcagattggtaaaacggtcatccatccgacggataagtatctgatgatctctcattgcaactgcctgaagcgtgcagaatggcttaaggttgagattgagaagaaatacgcctttaagggtattgtgatcgtggatacagcaggtgttgcaacgatgtacgccaatgatggcggtattatcgtagcctattaaggcagacgcttaattttaaaagccgatttctgggattatgaatcaaatgattatcaaaatcctggaaatcggcttttatattttatctgcagtttatttaaatgaatcgcggattatttaatagaattggaaaggttaggttacagctgtaatatattgctaaaattgattgaaactgtcggagttactgttttttctggtaacgtttttcgacaaaagagagcagctgatagagtaccatagccagtatacacaaaataataatgctgagcatgacgtaatccagacggaaaacctgactgccgtagataatgagatagcccaggccggcgttggccgccagaaattcgccgataatgacgccgacgaggcagagacctatattgactttcaggttactgacgatggccgagatgctggccggaagaacaatatagcgaagaatatctctgcgtgtgccaccaagggtccggatgagcagtagtttatcactgtcaatatgaataaaggcggtgtaaaggttgatgatggtgctgaagactgccattgtcacaccacatacgatgatggtcttcatattgttgccgagccagacaataagaatcggcgccagcgctgtttttggcaggctgttcagaacaacgaagtaaggttcgagaatatcagcagcgctgcggcaccaccaaagcagcatggcgatcagtgtgccgatgatcagtacaaggacaaaactgacaagggtttcaccgatggtaatgccgatatgataaaaaaggcttttatcagctgccatttgcagcataaccttaaaaatacgggtcggactgctgaaaatgaaagcgtcgatcagatgatatctggatgctatttcccaaccggccaagatgaaaatcaggatgaaaaagcgcatgcctgtaatgaaatatttctgttttttcctttcagcaagaaattcttcccgggatgtgttggaaaccgggtacagaatggtcggatcagacatttaattcaccccatatctcattgaaataatctttaaattcaggtgccatgcgggctttaaaaggtgttcggtctccatcaagagtcaggtggatatcaaaagtctttttgacggaagccggacggctggtcaaaacaataatacggtcgcaaaaactgatggcctccgaaatatcgtgggtaacaagaacagcactcatgtgctgagtgcgaagaatccggtaaatgtcgtcggaaaccgtaagtcttgtctgataatcgagggctgaaaagggttcatccaaaagaagaagactgggagaaagggccaatgtccggatgagggcggctctctgacgcataccgccggataattgactgggtctggcatctgcgaaaggggcaagaccatattcttccagcattttatcggcccaggattccttttcgggtgtcagtttatgatgaatccgcgggccgagtgtaatgttgtctttgatacttaaccagtcaagcaaatgatctttttgaagcatatagccgatttcggctgagacggcaattttgccggaattaggctggatcaaacctgcgattagggataaaattgtcgattttccgcatccgctcggaccgatgataccgagaaaatgatccggaaaaacacgaaaacttaaatttttgacagccggtgtttcaccttccgctgtctgataggtatagttgacatcggtcaaatctaaaagcggcttcataaaaacctccttatagcggtatataataaaatatgcataaacagtgtctatgttgcaagggggcgctatttatgctaaaatgcattcatatggcatagatgtcagaacacgtcagatggcttttggaacaggccgggttgcctggtgttcacagtgttataaagtgaggagattttatatggataaaaagcatagatacagcgccggaatgctggcagctgcacttattgtcggtattggtattggcttttgcggtggttttgcagtgggcggtcataccggtagtcggcagcagaatacaacagccggggcagagcagagctttgaaacaggagatttatcgatggaggaatcacagaaaatggaatcgggtactgatagcagtggcgagacagagatcgagccgattggcagctatgcggtggatgatgaaccggtgctgaccattgatgataccaccgtttatttgtcagaaatcaatgcgagagcttatatggccagagatcagtatgtggcagattacggtgaggaaccttgggatacgaagatggataatggaatgaccgtgggtgagtatgccaaggcaaccatgctggatgagatagaacgggcagtgattctctgtaataaggcggatgagtatgatgtaccggctttgacagatgatgaggagaagcagtgcgcgtccaaggccgaggattatatggcatcgatcggtgaagatattgcagcacagttcagtgtggaacagtcggcggtattggccatctatgaaaaggatgccctgtccatgaaggtttacaatcagattctggagaatctttcagaaacccttcgtcaggaagatgattataaggatatggaagacaatgaattcgaacaggttttgaatgacaagtttgaagaacagtatgcccagtggaaggatacatgcaaagttgagacaacagagacatgggagcagcttgtgatcggggccgtcggttaggtattatcagggcagacaatggccgttggtgcattttgaatataagcaggatattaaatgatgagaaggacagggaggtctttagatgggattaaagaatttaattaaaggacagcttttatcaagcatcagttatcgttcctcagatccgcaggaactggcagctgtttatgacagagacggacgcaggattatgtatgaatctgttttgacggttatgccaggacaggcagcgatcctggtgaacgaaggacagatgacggatatttttatgccaggccgatatgaactgacaacaaataatatgccggtgacaacaacactgaatcaatggaaatatggttttcatgacacatttatcgtggatattatttttgtcaataccaatgagatcattgatataccatggggaacgagtgaacaggtgacagtgaaggatgaagtctttggtcttgtcaatgtgggagcgaacggcaagtattcattatcaatcacggacccgaagctttttgcggagaatcttatgggtgtgaagaaccgatatacggtggctgacctgaagagttttgtgacaccgcagattgccatgtatttcaaggagatcgtgacagagaagcagatggatttctttgacatgcagggttactgctatgaagctgcacagattctgaaggcaaagagtgatgatttctttggccgttacggtattcagatgcagaagatggctgttcaggtggctttaccggaaacagtgaagaaatccattgatgaacgtgcttctctgggcgcctttggcggcatggatgcctatgcttataagagacaggtggatgcacaggcagatgccatggtggctatggccaagaatccgaatggcggtatgaacagcatggcggggatgggtatgcagatgtctgctggcatggctttcggcggcatgatggccggccagatgaatggcggtgtgcagggacagtcaggtacacataaggaaagttttgtgatttgcccgaaatgtggttctgaaatgaagaagggactgaaattctgctctgaatgtggtgcctcactggttgttcagaagaagaaatgcattaaatgtggtgctgagattaatgcagatatgaagttctgtccggagtgcggagccaatcaggcacagcctgtttgcccgaaatgtggctataaggctgcggcgggacagaaattctgcccggaatgcggaacaagccttttgtaaaagcgttgtcgagtcgcagttttcgatggctgactttgaacagtgctgaataaagtagacaaatagagaatctggaggatttttgaatgagtatatatgaatcattgaatcctgtccagcaggaagcggtctatcatacagaaggaccgcttcttattctggcaggggccgggtcaggcaagacaagagtgctgacccacaggattgcctatctgattgatgaatgtcaggtcaatccatggaatattctggccattacatttacgaacaaggccgcaggggagatgcgggaacgtgtagatcagattgtggattttggcgcagaagatatctgggtcagcacattccattctacctgtgtgcgtattttgaggcgttatattgacagactgggatacgacagaagttttaccatctatgatggggatgatcagaagactgttatcaaggaagtctgcaagaagctgaacattgataccaagatttataaggagcgtactttgctgtcagcgatttcatctgccaaggatgaaatgatcgggccgaaggaatatctgctccgttcagaaggtgactatgccagacagcgtattgcccaggtatatgaggaatatcagaaacgtttaaggagcaataatgcgctggattttgacgatctgcttttcaaaaccgttgaacttttcaaaaccgatgcggaagtattgaattattaccaggatcgttttaagtacattatggtggatgagtatcaggatacgaacacggttcagttccagtttgtcagtctgctggcggcaaagtaccggaatctctgtgtggtcggtgatgatgatcagtcgatttacaagtttcgaggtgcgaatatccacaacattcttgattttgaaaaaacatttccggatgcaaaggtgatcaagctggagcagaattatcgttcgaccaaaacgatcctggatgctgccaacggtgtgatccatcacaatcaggggcgtaaggataagacactttggacggataatgaacagggtgtaccgattgcgctgaatcagtaccagacagaatatgaagaggccatgggaattgtgaacgatattgcggcaaagacggagcgccatgaggctgaatacaaagattttgcggtgctttacagaacaaacgcccagtcccgtgttttagaagaaaaatttgtcacacgcaacataccatatagagttgtgggcggcgtgaacttctatcagcgcaaagagatcaaagatattctggcctatttgaaaattatcaataatggtcaggatgacgtggcggtgagacgtgtggtgaatgtaccaaagcgcggtatcggtgccacaacagtgacaaaagcggcggagtacgcggatcagtggggaatcagtttgtatgaggcctttaaacaggtggatggtattccgggtctgggacgggcagcagcgaaaatcaatggctttgtgaatttgatacaggttttcagaacaaaggcagaatatatgtccctggcagaattgtatgatgaagttctggaagatacgggctatctgaaagagcttcaggcagagcagaccgatgaagcaacaacgcgaattgagaacttagacgaactgcgcaacaagattgtcgcctatgaggaggagacggaacagccttccctgaatgaattgctggaacagattgcccttgtggcagatgtggacaatatggatgattcggacaacaaagttattttgatgacgctgcatagtgcaaaaggtctggaatttccatatgtttatttgtgcggtatggaggatggtttgttcccgagttatatgaccattgtcaacgatgatcctatggagattgaggaagaacgacgtttgtgttatgtgggcattacccgtgccatgaagaagctgaccctcagttatgcgatgtgtcgaatgatgcatggtcagacacagtacaataaaatttcccgttttgtgaaagagattccgccgcagctcatcggcggcagtctgccgagagagcgtttctcgagaaaggttgaggatgatctgccgtggaatacaggcagtgcctccaatggtatctccggttttggcggcagcagagccggtacatatggcagcggcagcagaatgggtacaggtgtgggcaatcgcggtatcagacaaagtcacaaatttgatgtcagcgcttttgcgaaaaaaggcggcgatatgaagaaaaccgcaccgaactacgaagtgggtgatacggttaaacatatcaaatttggcaccggtgttgttcaggccatcaaggatggcggcaaagattatgaagtcacggttgattttccgaaatacggaccgaagaaaatgtttgctggatttgcgaagctgaaaaaagtctgaaagaggtagtattttagaaaaaagagtgctatactataagcaaatctgtttggtagaaaggatgtgcggacgacatgaataagtttgaagaatatttaagcatggccaagatttctgattttattcaccgtaaggaactggaagacgagaagaagaaaacagtttgcctcgtatttgcaattattgcaggcattgcagcaatcgcagcaattgctttcggtatctacaagtatttatcccgcgaggatgatgtagatgattttgaagacgactttgaagatgattttgatgatgactttgaggacgaggaagacgattttgtaaaggaagatgaagctgcgcctgctaaagatgaggaatagttttatctgagtagttacagaaatttgtataattaaacagacaggaaagctgttacagataaatgctgatttgtaacagcttttttgggtaaagaaagcattttgccaaacaggatatgatttacgagaagtttttagaaacagataggagacgaagatgaaaaaaggacagatgtgtgaaggcatcattgaatatatcgattttccgaataaagggcgtgtgaaagttgaagatcagtatgtgacagtgaaaaatggtattcccggacagaagatccgttttgtcattaacaaaaagcgcaaagaccgctgtgaaggcagattactggaagtactggagaaatctccattagaaaccattgaaccggtctgtcatgaatttccggcctgcggcggctgcatgtatcagaccatgagctatgatgaacagctgaagatgaaggccggccaggtgaagaagcttctggatacagccattagttcagctggccaggtagatgcggaaggaaagccggattatgtttttgagggtattacaggcagtccgaaacagtgggcttaccgcaacaaaatggaattttcttttggagatgatcatttggatgggccgttgacattgggactgcacaagaaagccagtacgtatgacatcctgacagtggatgactgcaagattgtccatgacgattttacaactgttttaaaaaccgtgttggattatttcaccgagcatccgatgccgtattataagaaaatgaaacataccggttatctccgccaccttttggtgcgtcgttccgagacaaccggagagatgctggtacatctggtgacaaccagtcaggaagaatgtgatctgacagaactgacccagcgtcttttggctcttcagcttgaaggcaggattgtgggaatcatgcatatcatcaacgaaacactggcggatgtagttcagagcgatgagacacgcattctttacgggcaggattatttttatgagcatattcttggactgaaattcaagatttccacattttcattcttccagacaaatacactgggggccgaattgctctacgatattgcccgttcttatatcggcgatacaaaagatatgactgtttttgacctttacagcggaacaggtaccatcgcccagattttggcagcagtggcaaagaaagttgtcggtgtagaaattgtggaagaagctgtcgaggcagccaaagtcaatgccggactgaaccagctggacaactgtgaattcattgccggtgacgttttgaaagtgctggataccattgaagataagccggattatatcgtccttgatccgccaagagacggcatccatccaaaggcattggacaagatcattgattaccaggtgccgaatatggtgtatatttcctgtaagccgaccagcctggccagagacttgggcgtactgatcgagcgaggatataaagtgaaaaagacacattgtgttgatatgttcccgggcacggttcattgtgaaactgtgtgcctcttgagcaaccgaaaaccagataccacggtaaaactcagtgtggatatggatgattactaccgtattaaagatggtaaagagcctaaataaaaccgaataatacactgaaacaaagcaagacagaagctgttgatgcgttagaagataacgtgtcagcggctttttctttttatctgaaaacctattagtcaaatctgaaaggagtcaattctatggcaaagaaaaatttaagaaatatgaaggtttgtggacagagcggttataaatatgagacggttccggcaattacattaaaaggaaaatggctggaagaactgggatttcatcttggggattatgtacaggtgaaatatgaaaatggtcagctgattatcacgccggatgtgaataaagcacaggagcaggaagcaaaaacagcatttatggatgaggagattaagaaattgaaagtcagataccagaatgaaaagaaagaaattactgcaaaatatgtggcagagcagagtgcaggctgttatggaaagaaagcatgagagggggagaatgtatggcaaggattattatgtgtggatcatttaaagggggagttggcaaaactgccagctcctggaacctggcttattcactggctgagatgggaaaaagggttctggctgttgattttgacagccaggcaaatctgacaacctgcttcggagtagaagatcctgcggctgtaccggtgacgattggacatctgatgatgaatcggctggaagatgaggaaatgccggatccgtcagagtttattcagagcagaaacggtgtggactttatttcatcatccatgatgctttcagcagtggacagtacgctgcggatggagatgggttcagagaagatgctgaccggcattctggagccgctgagagggctgtatgactatattattgtagataacctgtccatcgcttggaacattgacaattaacgcactgacggcggctgatgaggtgattattgccgtcaatccgcagcttctggcaatgatgggattgcaggattttatccggacagtgaagaaagtcagaagcagactgaatgaccgcctgcagattgctgggatcctgctgactatgtgtgatgccagaacaaatctctgtaaggtaatcacagaacagctgatggatacttttgatggacagattcggattttcaagagcatcataccaaacacagtaaaggtgggagaatcaatttattatagtgagccgcttctggagtacgcaccggagaataaggcttgtaaagcataccggaatctggcagaggaggtggctggggatgaaagctaatgcaccaaaaagaaaagtatttcaggacgcactggatcttctttctgaggatccggtgcaggatacgccagtgtctgtgaacgggattgtatctattcctgttgaggaaatacatccgtttcatgatcatccattccggctgtatgagggagaacgcctggaagacatggtacagagcatcagggagcatggagtgctgaatccggtgatcgtgaggaaggctgcaagggactatgagatgcttgcagggcataacagaaccaatgcggcgaagatagcaggattgacggaagtgccggcgatagtgaagacggatctgtctgatgaggatgcttatgtatatgtgattgagacaaacctgttgcagagatcttttgcggaactgcttccatcggaaaaggcggcagtgctggtagcacgttatgagaagataagcagtcaggggaaacggaatgatatccggcaggagattgaggctctggaagaaacctgtggacacgatgtccacaagtccagaaagagaacctgtggacatgatgtccacaagtcacagaaaagccgtgatgggcttggtgaagaatatggaatgactggaaggaatattgccagatacatgcggctggatcggctgattccggagtttaaagatgctgtggataaagggacgctggcaatggtggccgctgtggatttatcctatctgaatgtgaagatgcagaagctgatccagcaggtggcagaggcagatggaaagaaactgaaaccgaagcaggcagtggaactgcgtaggatgggaaaggagattacgaaagaagggattgaaagtgtcctggcagggaaagaacagaagaagccgcagaatgtgtctgtgaaactgccgatggaattgtatgagaagtattttgcacagatggatgccggagcagtgcaggagattatggagaaggcattggaagggtattttgggaaggaggcagcaggtgtttagcagggaagatcttgaatgtctgaatccggggtattttgagattatttatatagatgaccgagatgtgaccatcatgtcccggaataccagacatatgtggtatatacataatccggaatatccattgatgggatcctgtatcatatttcataaacataaggtgtcccatccgtatcatcagcatggccgcagtaatacactgcggcaggctgtgcggagtattaagagccatgataaatggcagttgggtgggagaaaatagttgcccttaatttgccctgattttaggttgatattttaatgaatatagtttaatatagacctataatttgacaagtcaggagagataagatggataaaaaattggtatttttagattctgttttgcttcaacaagatatgagaattaggttaccaaaatcggttttggttaatattgatggcaaggctggagaaacacgattagatgtatattttgatgcaattacaaaagagattattttgagaaattctgataatcaaaataataaagagagtaaaataaaaaaacaaggttaaaggagagtaacaatgccatatacacatattgattgttttagtggtccaggtggcttttgcactggtttgcatgcagcaggatttgaaacaaaagttgcgattgaatatataaaaagttgtgtagatacatattcagcaaatcatccagaggtacatgttattcattcagatattcgagaggtaacagctgatcagatactaccttatattccaaaagagggaattgatttagtaacgtctggaatgccatgtgaaactttttctaccgcgggtaattcatcaagagctgcgtatgatgatcgtcaatttctatttagagagggaattagaatcgcacagattgttaatgcaaaaatgatactgtttgaaaatgttcccaatatacaaaataaaaggattgcaaagaattcaaaagaactggtcatagattatttaaagaaggaattagaagaagccgggtatggaaactttaaagaatttgtcttggatgcaagcaaatatggggtacctcaaaagagaaaaagattttttattttagcaagtaaagattctcaaattgatgtaagccagactccggtagaaacgacacctgataaagaagtaactgtgaaggatgcatttattgatataccagaagttatagcaaatacatggacagagaatccgaactatttgaaagaagaatctgaatatacacggttaatgaaaaatgattctttttggaaaagaattacaaaagaaaagaaattacttaatcatcttccaatgaaccatagaaaaaatatattagaaagatttacgattttacaacaaggcgaaggcttaaagggattgtttgaaagattaacagcagaagagttggcagaatatcaatcaagaaaggttattcctaaaacaatttatgtgaaaagaaattaccgcttaaaatgggatgaggcttcacctacagtaacgagtcattgcttagatgaatttgttcatcctgtacagccaagggcattaacagttcgggaatgtgcccgcttacaatcgtttccagattcatatgattttgtaggtggaaaatatttaactgcacatgataacagagaagaacaggataaatatgaacagattggtgatgcggttccaccgttattggcatatgcttggggaatcaaaataaaagaattattggattaacggaaattaaaagcaggcaaaaaggcctgcttttaattagtctagcaaatcttcccattcaaagaagaactcaccaaattttttacatggattcgtggaaaagaattatttaattgatcataacgattaggaacatctaagtaataggctcgcttaatttgtgcaataaataattgataattgatccattgatttggaacgcatacatcatctactttccacttggaatgatctttgctttctgagttcatttttgcctcggatatacatgtgagtaatcctaaaaatcttccagcgccatacgcaccatcgaggatacgctgttgagcccatacttctacacaacgttcacgggtagaagtttttacaggaacatcaaatttaggcatattaggaccaagattgaaaataaaatcggtaggaatcttgatgctggtagaatcaagttcacaggcatattgcgtactgcttggagctacatttaaatgccgagaatagatatgacctattaatttttcaaaataggtaccacaaattttctgggaatttgacgcaattaaatcagtagaacaacaaaattccattgatatagcatataatgcagaagttatgtcatcagcagactgatttttaattgtattgttttttagattatgtaaaaaccagtctgctttggttatggtcaagccttcttgattcttaactggagtaccagaaaaatcagtagcaggttgataaccatcttcaaaaagcgcttgatttacaggacgagaatgttttttatcatctgaaaaatagaagtaagttttgccaatagttccattacctggattaagactatgcttttgtttggattttaattcattttggcattcattgtgaatgtttattattatatcagtaactgcagatgcaaggggattttgattaaaagactcctttaataaattatattcatttagtatgggatgctttgtttttgccatgttcttcctccgattgttcaatggattttttcagtagtaaatatggatcaatttttagggcagatgcaatttttgcgatattatctatagatatgtttcgctgttctctttcgatggaactgatatatgttcggtgtagactagagagttcggctaacttttcctgtgaaagattttgctgtagacgatattttcttacattgatagcaaatatgtgtagtaatgacatagtgtaacctccaactaattcttaatttatattatgacaaaaagaatacaataagtctacatacaatacgtcacctacttgttgtacataagtagaaaattgctttgaaatatggtatattatgaattatataattgattttggagggacacattattgagcaaaattaatatctctgtagattttcagaagttttgtaattcacttagaatgtcagataatacagtatcaaatgtgcgtaatagatatcatatgattactaaaaggattaatcaggacttttggaatagtgattcaattgtttcccacagctggtatgtaggttcgtatggacggggaaccagtatttacactagtgatattgatatagtagtggaaattccatggacagaatatgaaagatatgacaattatttatataatggacaatcctctcttcttgcaacattgagaaatagcttattaaaaacttatagttcatcaaaagttagtgcagatggacaagtggttgatattatgttttcagatggaatcaagtttgaagtagttccggcattcagatattcagatggagcaggattttgctacccggataccaataacggaggatcctggaaaagcatagatccaggaatggaaattggagtatttaactatagaaataatgaaaccaataaaaatttgaaaaaattatgtagaatggccagagcatggaaagaaaacaagacagttctaatgagtggaattttgattgattctatggcttataattttatgctctcatatcaatatgcaaaagagccgtttatttattatgattggatttccagagattttttcaaatatgtgtatgataattcagataaaagatattgggataagccaggggggataggaacagtagagcgcaaatattatataaaagatgatgctaaatttgcttatgataaagcatgtgaagcgatagaagatggtgaaaaaggtttcagtttctgctggcataatgaatggagggaaatatatgggtcaagatttccaaacgcataaagaaaaactttatcagcaacttaaggaacaatatggaaaagtagtttatacatatacggcacatcttaaaaatgcaggatttctacagagagattgcaacagatttaaatgggtacaaatcattttgtctgccatatcaacagggggatttgtggcaactgttattatggatgaggcaaaagttgcctgggtcgggggaattgtatctacggcgttgcttgttgtgaatggttatttaaaaagtaaagactttgcagcagaagaacagaaacacattgatgttgctaatagcctatggtcaataagggaagattatatttccgtattaacagactttgatgcattatctgagaacgaaataatggaaaaaagggaactgctcaaggatcggactgccaaagtatatgagaatgcaattcaaacggacaaaagaagttacacggcagcgcagcaagctttacaaaaagaagaggaacaattctttcatgaagaggagttggttaatattttaccacagcatttgcaacaatgattttagttgccttagaagtctataaagataaattatgctatattttgaggattgttatggacaagttgacgcctgagcagcgtaagaaaaatatgcggagcataaagggaaaagatacgagcattgaaatgatattaagaaaagccttatggaagaaaggatatcattacaggaagaattacaaaaatcttcctgggacgccagatattgcgctgacaaaatataaaattgctattttttgtgatggagaattttttcatggaaaagattgggaaattttgaaaccgcgtcttgagagagggaagaacagtgatttttgggtgacaaagatttctaaaaatcgtgagagggatgaagagattaataagaaattactgtttatggggtggacagtgattagattttggggaatggatataaagaagaacacggatgaatgtatacgggttattgaagaaattatatttgatttgaaagtatctgaagatatgggtgaataataggtaataggcatttaggatgctagacaaatgataaaatgttgatggggaaaataaaatggatgaatatgttttgttgacatattatgcggaatatcttaaaaagatacgcaaggtatctgattcgacaattaaacattatcagcaggcaatgagatatatttcaaaatttcttgttgagaaagaaaaaataaaacaatcaatctatgaaattcagaatttggacgaattagttatcattaaggaatacttatattcagaaccggagtttattgaattagatacacggggacatcggatgtatagtgcggggtttaataattattttaagtttgctaatggtaaaggatttgaaaatattcatcaacaaataggggttatggatattgaaattccagctacaaacaagcaacttcttgttgcggatacatggaggagatcatctataattaaaatgcagtccatagaatcagcaggatatgaatgtgaagtaaatccaacacatgtaacatttactgctaagagtacaggaatgccctatatggaaggtcatcatgctttgccgatgaaatgtcaggacagatttaagagtagtttggacatttatgctaatatagtttgtttatgtccaacatgccatagattattacattatggtattgcatctgaaaaagcaaatgttatagataaaatatattatgatagagctgatcgccttgcagcaagtggcataaaagttgggaaaaatgaatttgaaaatttgatggaatgttaatctgtattgaaaaattaaatgaggagaattatcttgcaatcagaattagaaaatattattaaagaactgctctcaaaaggatatgagggaggctattgggattataaagaggactatacctcatgcaaagaagataaactgatagatattatttgtatggcaaataatatagaaggaagagatgcttatttgatttatggagctgatgataatggtatagtaaagggaattgaaacaacaactgagccaagatatacaacaaaaatggttactgagttccttaggactaagccctttgcaggtcaatatgttccaaaagtttcagtacaagtgctgcaaatagatggacatgaattggatgtactgatagttcataatacaagaaatacgccatattacttaactgacaaatttaatccaagccatgataataaaaagatgcttctgccaggcgcggtttataccagaattaatgatattaatacacctagaatacaaacagcaagttttgaacatactgaatatttatggaggaggagatttggcattgatatgacaccgtctgaaaagttgttaagattactggataatccagaagactggtcagaaactcggtgggatgtagatcggcatagttataatatatataatccagagtatcagataaatgtgttagattcacaagacgcatatgaaactataagttatttttacgatgatgaaagaatgttgtatgcgcctttaaaattaaattatttgacgacaacgttgtatgagatagaactttggtatatggacatgggaagatgcctgattccaaaacctgaacataaatatgatatggaacatggtttgtactattattacattgaaaaagattcattaaatggaaagttattaccgttgtttgcgtatgggaaaagtcagtgctgtgatcggtcaggaagggaagttcctattatgatttttgaaaataaagaaatgcgcacagagtttgaaagttggttggcaaataatctttttttaaaggaaaaatacattgctgatttagaaaatagtgccatttttcaacacattaggggaaaagaagagaagtttgggaaaagtgcatgtagtgtgttagaagttgcagtggcatttaaattttataaaaattggataaatcagcgagaagcttgattgcaaggaaatccacctgtcgatcagttgaaaccatcagttgaaacaggtggattttttctgcttaaatacgatcaattgttcgcatgtattctttaaagattggtctgagtgtctgtacccagctgtagagcgttcgctgtggtttatgcaggattgcagaggcttcttttaaggtaaattcttgtccaagtagtttaattaattccatatatctgttatacttgggatagttcttttgaatgtagctgatccatccggtgagtagttcctggtagtggtcagtatagttgatgtcacgggtggacactggctcgtaggaatcagtgtttccgtctttgtccgtgacggataatgttgaaaagcaggtttttcctttcagaagattgaacttattgttgtacggacaggcagtacagctgttagataaggttttgggctgcccgttgtccggagtgtatgaggggttgacgattctgatggggcagaatcttgcttttccattttgaccgctgacgatacagcggttttctattctgtaatgatgctcctgcatccattgttctcgtttgaaaacatcataggcgtttttattgacttccagtttgagggcgggaaccattttgccttctatgcacatcttagtgtcatggataacagttacggaaagtttcgggaattgctggaatataagctgacatggagaggcaagaaattggtacgttactttggtttgtgttcttaaaaattctttttaggaattttcgggattgttttgttgttcaattatcaaagttcatgtatcgctcatcaagcgacttgtttattctaccagatgtctaagtgtttgtcaacaacttttttaatttttctaataagttattttcaaactgcttatgaatctgtactgtttcgcgttattctcgctgacagcttgtatatcataccatctcttccaacatctgtcaacacctatttttaagttttttaatttttccttttcctcaattgcaaagttaaattccacccctctcgaaaatgaatcctggaaataactattgtgaaatatgcaaccatctttcacattaaaaggccggagcgtacgaaacaaaatacgccccggccccagttttgttttcactgttatcagccccacaaaatgtctttgaaaccgttaataaacatcataatgtagttatgatcataaatatacctcaggaacaggctttcattaatctgcgcaaacaaataaccgcccagttccgtaccgcttaatatagtaataataatacagagaatccaaagaataatcatgccttttaataagccgacaagcagtccacccattttgttcatggtatggatcaccggaagcctgctcagaagattcagacacctgataataatcttcataatgacagatactgcaaaaaataccaatacaaaagacaacgcattgaaaataagctctgtcacataattggctatgtaggccttgaatgcggaaatccccagaacatccttctgtgtatcatcactgtttgccaatgcctgctgcacaatatccggcaatggcagacgatcaatcatatgctccttgtctgtatcttcctgttcatcctgattcttaaaaagtgatgcttccacccgctgactgaccgcatcaaaatacgcggtattctgccagttctgactcagctgcggtgacagctgtgccgccagcgcaatggcgatcactgtggcaaacatcgaaaaaactgtcatgatcaaaccacggcgccagcctttaaaggcataatataccagcactgccaacgccgcccatgataatatattcattctgtctccttcaatcaaaaaatacttatcctatgtacgtatttccctcgtatgcttatcttatacgtatttctctcagtgactgatcatcaatcagccagtacaatccgtcctcccatgacggcatgacgcctgtcactgctgtattgaatgtccctctgaagcgaactctgccgcccatatgataaatcagcatttcttcatcattatacaaaatcacctcatcatcatctgccgtcattccactgtaatccaggtcaaaatagtacgtactgctctttttgcctgctttattataaatttccatacggtatttgccgttgtcatcttcattcttaaagataaaacctaacttctgattcgtacagaaaacactgttgatctcactttcaaagttctcctgcgtctctatctttttgctgtctgcctgataaagcacaaagcctttctccccgaacagaaccacttctcggctgtcaagaaacgctgcctttggatataatccttccagttcctgcgtatccagcagatggtcgccctccacatctgaaaaatcataggacacaattcttgactgcatacttccgcttttcacgatcagataactgactgcaagcttcgacgcatcaggtgaaagggcgattgccagcggataccccgtattctcaagtgaagccttgatacttcccaggctgtttccctgtttgtcatataagttgatatagttgctggatgtatctgaaagtaccgctgcaacgacaccctgctctgagatctgtatctcctgaatcggtacatcggtggacacacgccccagctgcccatattcattaaatatatagattgtgttggccccgatatctccaactgccacataatctccggctgacgtcatcgtcggtgatgccatctcataagtctgattccagaggactgaaccgctcttattggtcattgcaacaccgtctttactgtacttgaccatgcccttacgcatcatacaatagtaaacagacgtatcgtctccccgggacatcgatgtcacaacctcataggaagacgccactttattgttcttcaccaatgcatagaccagaacaacagcaagaatcaacacccctgccacaatcgtccattgcatccggttcatctttaactttcgtttttctttattttgctgttccattttactcctccgataatacattcagtatagtgaaaaatcctttggccgtcaacctttttaccatactccggaaaagccctgcagggacacagcaattcagccccaatttacggcagtttaagaaccattcccggataaatataatcaggattttcaatctgattcagctggataatggccttcacatgctctgcgtcctgataataattccggcttattttcagtaatgtatccccctctttgacggtatactgctgatagacttttcctgcagtcgccgtccctgttgacgaaactgttgtctctgctgcatcagcctgctcctctgattgattttcttccgaagattctgctgtaccagtctgatctgcatcctcagtatcccggatatctttttctgctgctgactgctccgcctgctgcacaatactttccacaatatcaaaatgttcggcattatttgccgctgcggtttctatctgtgtctcctgagcaacccggttttgcacaaccggcaaaatgccgccgggcatattgcgccttataccgatggccacaagaatcagcaccagcacagccgcctgcggtatccatttcatattcctgtttttgctttttccactcaccgcttcccgtcgtatatgatgatctgtttttttctcatagagtctattttgaaatcccggcgttccttcacgcatctcctggttttcctgtctgatctcaatcatataattctgcatcgcttcatttctgtcatagtaaatgtaatagccatgctgtctgaataaatgtccgttttcataaagataaaaggcatcctcccgatctaatggatcagccgtataaaaaattggtcctttatctttaaaattatcactgtgtattttttctatttctccgtccgcagctgcagcctgccccggtctcgacaaaaaccaccccagtatatgcctgtttttaaaataatgattgattttgtcatacaaggctgtccattcatccgacgataatttgaaccgatcctctttccactccatcggcactacagcaactgccgcactgataaagtaaatatccgtactctcctttttgaccttttcaccaagaagaagtgctgctttttgaagagaaggtttctctcccgtcatctgattcagatacgtcatcacataatcttctatatatatttttattttttccccgggtgtacctacctgacgaatattattcggcaattgaacagtattattttcctcgctcttaatctcaaccatgctgtgcctccttttcacttccctatgttagcataagcagatgtgattttttatcaaaggctgtcgggctgccgctcacaaatgatagacaatactgttaatccaatgccgcttctttatctccggtataaaatataaaaaaaaggaaaaactccttttaatcaagataaaaaaaggatttttcccatgtattcatctatatggatcaacagcgcacagcctgacgctgctgatattttcagtcgaaatctgcgatatttacttaaccgtgtcaaccctcggggaaagccactggcctttgcctgcgtcggatctgccaacgttcccggcgacagcctcgggccattgatagggaccatcctcaccagacacgggcttccaaatgtttatgggacaatggaatggccactgaatgccctgacattgccccataacatgccgttattaaaaacagttgaaaaaaaatactgcctcatcgccatagatgccgccatcggaaatccggcgcaaagcggtcatctcacgctgacagaaggtgcactcttccccggttcagcccttcgcagacagctgccgcccgttggtcatctccatataacaggtgtctttgacaatctcacccatccctctgcccgcacactcctgccagcgttttgttatccactcacatacgccattttgtcattgcagaatgaggccgctatttcccaccgtccggcactcttttaacggcaatatctgtgcaaatctatgtgccgtaactgtgcatgctcaccctatgcacagcctttaacgcacatcttgacaatttatttttgctcctttatgctgatggtccttggtttgtgcttacattgtatacggcggtatcactgctggtcacttataaacctgtataagtctttttatcttaagttatatttcttcaaaatatttacaacaaaatcagacgactgctcgcaaagtgacacaatttcatctatagatttactttgaacataatacgaaagaactaatgcctctatttgtagcttatccgcccttgccttttcctccgctatctcctgctctgattgacgacgcgcttgttcgacgccccgtttaatgccatcctgaacaccttcttcataactaatttccttttccgaagcaatatgtgcggcactatcatattctttaaataacatattcgtaacctccgctctgtgtgcacgtaaaagctctgcaaggacaccctgatttatacaatccgtaactgttgactcaatagcatcattaagcggcaaaccctccgcaatattttcacgcaaagcagccacaaacaatgactactgatgcaacaatggacagcgcttaatcatctttgtgctgtgtccagcgttaatatttatcatatgagctgtaaactctgccgaagatttttcaggagcatctgtaccgaccatgctgtctgtctgtctaagaaccacttcatcctctgcttttttcagtccgttataaaaaacataataacggggaacgggaattgtcagctgtttgctggcatacatatccagatgattcttttcaatatatttcttaaaagccgagcccgtgtaaataaaaccacgcagcggcatattcggattataggtactctgatgctcgaatatattcaaattccaatcaatgagaaaagaaaggtcattcttcatccccatgtacagaaaatcactcatcgtataaaattcaatcgcatctgcatcctgataatcgctgtcattgacagcattataaagcgaaagtgccgcctctttattattgaaaataaatctgaaaagactgtccttataattacggttgtaattcgtattatcctgcatacacattatatcaatagaatctcctttaattatatcaaaactcaccggtggtgcaactattataaatcgattctcttaaaaagtttgtcacaacgtgtagtcgaatgaattaattttgatgtcgaaaaaagccaataattctcatccttccggataaaaattattggcttatatttgttataattcagttcttccctcaagggctctcagcagcgtcacctcatcgatatactccaaatctccgcctaccggcacaccactggcgatccttgtcaccttgatccccgtcggcttgatcaatttgctgatatacatcgctgttgtctcaccttcaagggtggaattggtcgcaatgatcacttccgtcacatctccctgaagtcttgtcatcaattccttcagacgaatatccgacggaccgatgccaagcatcggcgagatagccccatgcaggacatgatagacaccttcatacttctgcgtcttctcataagctgccagatctctcggagtctcaacaaccataatgacatgatgatcccgcttcggattagcacaaatcggacacagttcactgtctgtcagattccaacagcagctgcagtagcgaatcttctctctggctgaaacaatggttcctgccaggttctgcacctgatccttaggcatattaataatgtgaaacgccagtcgctgtgcggatttggcaccgattcccggcagtttcgataattcttcaatcagcttgttaatctgattgctgtaagcatccattaaaatccaaagcctccgccaaggccgcctgtaatcttcgccattgatgactgagatacttcatccatcttacgaagggcttcgttggctgctgccatgattaaatcttccagcatttctacatcttccggatcaaccacttcagggtcaattgttacagcaacaatttccttcttgccggaaacctttaccttaacagcaccgccgcctgctgctgcttcaacttccttctcttccagctctttctgagcctcttccatctgacgctgcattctctgcgcctgcttcattaaattgttcatattaccaggcataccacctgggaaaccgcctcttttagccattgttcttcctcctgttataagttactactatttatatgaatgaatcagcactctctccgattatctcacaaacaaccgaattacgccatactaatcctcataaacaatgtcaattccctgaaatgcctgtaccggatcaataaactgactggcattctcggtcttattcaaaggtactgcattcaccttcaccagcttaccaacacgctcactgagggcattctccagagcctgacgatgactctcttccgcgaaataaccatatcgcatatcatccgccagcgcaatgatcagctgattgtctggcccttctgaaatgacagcccctctgagcatcactgccatactcggtgtcagatcaccggtcacctgcttccaacgatcgataatcatccgaagatcttccgagactgccttctgttccggctgcacctgtaccccattcccagactgcagaccgcttatgccatcggcatctcctccggctgcaccgccgcccgaggactgtgaagacaccacaacacccttcgctactttctgttcaagaatagccaaccggttcagaactgcatccagattccgctccatggccggatgacagagcttgatcaatgccacctccacaaggacacgtttctgggtagaataacgcacctgccctgaaagatccgaaaaaatacgaatataccgcatcagtaccgacgcatcaatacctgatgcctcctgacgcatcacttccagctgttccgcagaggcttccaccagatctgtcagatcaccggagctctgcaccatcagaagatttctcagataccatgtaaaatcgacaacaaactgcgtcagatcccgtccctgcataacgatctcatctatcagatgaataacccctgaaacatcctgactgcagatgctcttcaaaagactgccgaaaacagaggtgtccactgcgccaaggacatccagcacattctcatacttcagtttctgtccaatataaaatgcgttgcactgatccaaaaggctcaaagcatctcgcatggagccatccgccattctggcaacataagccagcgctgcatcttctgcatcaatgccttccgcatcagccagttccctcaatcgtccagcgatggttcctgtggaaatacgtctgaaatcatatcgctgacatcttgaaagaatggtaatcggaatcttgtgtgcttccgtcgttgccagaataaaaataacatatgacggcggttcttccaatgtcttcaaaagtgcgttaaaagcaccaatggagagcatatgcacctcatcgatgatataaaccttatacttgccttctgaaggagaataagccacttcctctcgaatctcacggatattgtcgacaccgttgttggaagccgcatcaatctcgattacgttcatagaacgctgttcattgaccgcacgacacatggcacattcattgcatgggctgccattcacagggtgttcacaattcactgcctttgcaaaaatcttggcaatggacgtcttaccggttcctcttgtaccgcaaaacagataggcatgtccgatacgattcatctctatttgatttttcaatgttgtaacgatatgatcctgtcctctgacttcgtcaaaattcgatggacgccacttacgatacaatgcctgataagccataatctaccgcctctatctaaattatatattatttgtaactgttcagagccaagcaaaatttcaaaaaacaggtataaaatgcttgcatttttaaaactgtttttgaaattttatttggcggatacgccacaccgacgaaatgcgtagcattttggatgttggctctgaacagttacatattattatttattatagttcattaccgaaactgatacccatatctcttgcttcgcggataatatccgacttcggatcaacggtcttaagtcttccggccacttccttcaatggtaccggaacgatctcattattcttaaatgctgccatacagccatacttaccctcaaggatcattcgacctgccgctgctcccaaccgagtggctaccacacggtcataggcatccggactgccgccgcgctgcgtatgacccggcacaacaattcgtacttcctgacccagggcatcctgaatcttcttgccaagttcataggaaaccgacgggaacgggctgttcgccttcttcttctggtattccttcttggacagctgtgcatcttcctgggaaatcgcgccctctgcaaccgcaagaatactgaacctcttgccagccttgttgcgctgtttcaccgccatcagtaccgcatcaaaattgtacggcatctccggcaaaaggataatatccgcaccgcccgcaatacctgcatgcaatgtcagccagccaaccttatgccccatcagctctacaataaatacacggccatgggatgccgctgttgtatgaatacaatcaatggcattcgttgcaatatccactgcactctgaaaaccgaatgtcatatccgttccgtaaatatcattgtcaatagtctttggcagagaaacaatattcaaaccttcttcgctgagcagattcgctgtcttctgagtcccattgccgccaaggatcacaaggcagtcaagcttcagattgcgataagttgccttcatcgcctcaaccttgttaaagccattctcacctggcacccgcatcagcttaaacggctgtctggaagaacccagaatcgttccgccctttgtcaagataccggaaaaatcattcggcttcatcaaaatatagtcattatacatcagacctctgtagccctcttcaaaaccaaaaatctgtgtatcaggatccgcgttatacagtgtcttcgcaacaccacgcattgttgcattcaaagcctgacagtcgccgccacttgtcagcatacctactctcatcattcacgccatctcctttgtttagaatatgtcctcttctcttgttatactatatagtaaaataagcagaaattcaaccagaaaatcagcttttgcctggataagccagatttttgcgaatatatgttcttttttcttgacattcacatttcctctggtataagatatatattaggaatttctgaatccaactagaaattaaattatatatacagataatgacgaaactttataactcttccttctgatgaacctatcgatgaatccattcaaaacaggtgcttctgtcacggccagtacttagacactgttttttagtgtcttatgtactgctgccagtgacaggcagtgcgaacgtgcctgctttgaatggattatcgataggttctctaagactacaatgtttcgtcattatctggccaccactttttgaaaggattttttattatggcaccaaccaattcttataatgccgacagtatttccgtgctggaaggtctcgaggccgtccgcaagcgtcccggcatgtacatcggcagtgtctcccgcaagggcctgaaccacctcgtctatgagattgttgacaactctgtggacgagcatctggccggtttttgcagtgagatccatgtgacattgaacaaagacggctccgccactgtttctgataatggccgaggtatccctgttggcatgcacaagaaaggcatttccgcggagcgtcttgtatttacaaccctccacgccggaggtaagtttgatgattctgcctacaagacaagcggcggtctccacggcgttggctcatctgttgtcaacgcattgtctgaatggctggatgtgacggtcagacgcgagggctgtacttaccacgaccgctatgagcgcggtgtaccgaccattccgctggagaagggacttttgcctgtcatcggccgcacccgcaagacaggcaccacgatttcttttctcccggacaaggagatttttgaaaagacatggttcaaggaagatgagatcaagagccgtctccatgaaactgcttatcttaacccggaattaactattatatatgaagacaaacgtgtcacacctgaggaacaggaagtttatcatgaacctgacggtctggctggattcatccgcgacctgaaccgcaataaagaagcactgcatgatattgtctgctttaaaggcgagtctgaaggcatcactgttgaaggtgcttttcaatatgtgaatgaattccacgagaacgtccttggtttctgcaacaacatttacaacgcagaaggcggtacccacattaccggcttcaagtccgctttcacgtccattatgaacgcttacgcccgtgaaataggcattttgaaagagaaagacggcaattttaccggtgctgatatacgaaacggtatgacagccgtcatctccatcaagcatccggacccgcgttttgaaggtcagaccaagaccaaactggacaaccaggatgctgcccgtgccacaggcaagattgtcaatgaagaagtcgttcgttatttcgacaagaatctggataccttgaaggttgtgctttcctgtgcagagaaagcagccaagatccgtaagaccgaggaaaaggcccgtaccaacctgctgaccaagcagaaattctcctttgactccaacggcaaactggccaactgtgaaagccgcaatgccgatatctgcgagatctttattgtcgaaggagattctgccggcggctctgccaaaaccgccagaaaccgccattttcaggcaatcctgcctattcgaggcaagattttgaatgtagaaaaggccagcatcgacaagattcttgccaatgccgagatcaagaccatgatcaatgccttcggctgtggtttttcagaaggatacggcaacgactttgacatcagcaagctgcgctacaacaagattatcattatggccgatgccgatgtggatggtgcgcatatcagcaccctgcttctgacacttttctaccggtttatgccggagctgatttatgaaggccatgtctatatcgccatgccgccgctgtacaaggccatgccgtccaagggcagggaggaatacctctatgatgataaggcccttgagcagtaccgcaagacccacaagggcaatttcaccctgcagcgctacaaaggtcttggtgaaatggatgctgcacaactctgggagacaactttgaaccctgaaacccgtatcctgaagaaggtcgagattgaagatgcccgaattgcatccgatattaccggcctgctcatgggccctgatgtaccgccgagaaaggcattcatctacaagcatgcccatgacgccgaacttgatatttaaggagggaatgcatgatgcaggaacagattattcgcacggattatgcagaagtcatgcagaaatcctacgtagattacgccatgagcgttattatatccagagcacttccggatatccgggacggcttaaagcctgttcagcgccgtacgttatatgatatgtatgaactggctatccgatacgacaagccataccgtaaatgtgcccgtatcgtcggtgatacaatgggtaagtatcatcctcacggtgacagctccatttacgatgcccttgttgttatggcccaggaattcaagaagggcatgcccctggtagacggccacggcaatttcggctccatcgaaggtgatggtgccgccgccatgcgttacactgaagcccgtcttcagaaagtcactcaggaagttttcctggcggatcttgacaaggacgttgtagactttatgccgaactttgatgagacagagaaagagccgacggttctgcctgtccgtctgccgaatttccttgtcaacggttctgacggtatcgctgtcggcatggtgacaagtaccccgccgcataatctcggcgaggtcatcgatgccgtcaaagcctacatgaagaatgacaaactgaccaccgctgacctaatgcagtacatccagggaccggattttcctaccggcggtatcgtaacgaacaaagacgaattactgaatatttacgaaaccggcagcggcaagatcaagcttcggggtcgtgttgaggttgagcaggacaaaggcggcaagcttcgccttgtcatcaccgagattccttatacaatgatcggtgccaatatcggcaaatttctcaatgatgtttatgcccttgtagaaagcaagaagacaacggacatcatcgatatttccaatcagtcctccaaggaaggaattcgtatcgttctggaactgaagaaacagacagacgtggacaatctgctggcacttctctataagaagacacgtctggaagatactttcagcgtaaatatgctggccatcgccgacggacgtccggagacgcttggtctcaagagcattattgaatatttccttgattttcagtatgacctgaccacccgcaagtaccagaagcttcttgccaaggaactggagaaacaggaaatccaggaaggtctcatgcgtgccaccgatatcattgacctgatcatcgaaatcctgcgtggcagcaagaatatcaaacaggccaaagcctgcctgatgacaggcactaccgaaggcattcgcttcaagagcaaggcctctgaaagagccgcttctgcccttgattttacagaacgtcaggccactgcaatcctcgagatgcgtctgtacaagctgatcggtctggaaatggatgccctgctgaaagatcatgatgctactttgaagaatatcgcttcctacaaggatatccttgagaatcataagagcatgtcccgggtcatcagtcatgaccttgatatgatcaagaagacttatgccacaccgcgtaaaacctctatcgagaatgtgggtgctgctgtctatgaagaaaagaaagccgaagctatggaagtcgttgctctgattgaccgttttggctatgctaagaccatagataaggctacttttgagcgcaacaaggaagccgcactctccgaaagcaaatatgtcatcagctgtatgaatacagataaggcctgcatcttcaccgataccggacgtcttcatctgatcaagattactgatatgccgttcggacgtttccgtgacaaatctattccgctggacaacctgggcaactatgacagctccggcgagaatatcatccatatatgcaatctggcatccattcaggattccatgatgttatttgctaccaaaaccggtatgttgaaactggtcaaaggcagcgaatttgatgtatccaaacgaaccgttgccgccaccaagctggccgacggcgacagcatcattgccatctgcactgccgacaacttcaaccagcttgttcttcagactgaaaacggctactttatccgcttcccgatgatgaacatccctgaaatgaagaaaactgccatcggcgtccgcggcatcagcctcggttccggtgacagcgtcaaatctgcttatccactggacagcagccaggaatgtaccattatccacaatgaaaaggaattactgttgaataagttgaaacttgtcaacagaggcggaaaaggcacaaaagtccgcatctaatttaaatcaaacagttggctcctgtaaccttagcattttcgaaattttgctgcgccgcatattaacagcttctgcgcaaaactcgcccttacgggctcagacattgcttcgaagctgttgctatgctcgcaaaatttcaaaaattacgctaaacgtttacaagagccaactgtttgattttatattattcttctctcttttatttcctaaggcacaaattataacttacccacttatctgtccaacaccatctggttatattccaggaatctgaagccccagcgctcataaaggcgtttggcattgacattactttctgtgacttcgattctgaagcgcttgtattccggataatggtccacaatccagtgataggcttttgtgccgtacccttttccccggcattccggtgtaaagtacatttcttccatgaacatgcacattccgccgacttccgatgcataatagccggtcacataaccatatccgacaactttctcatcttccagcatcaccagaccgctgatatatggcatcgtcgggtctgtggccgcatcaaatgtacgctccagcaccgctgtgtctacatcgtgttcaactgccggactatgataaaaggtaatcaccatcggcataatgaccgctttatcttccactttcatttctcggatattaaacatactatttcccccattccttctatattctacaacaatttctatctcatatccgtccagcatggcggaagattctgaactttcatacgaattggctcaggatatgtctgtcccttcaaatccagttcgactttctcaataacttccggctcaaccggttcattgacctctacccccggaatcgggaaatcaacaggtcttgtcttcactttctcaagacgccatatctcatccatgccttcaataacttttccaaaaacaggatagattcccttatgatccgggcagtcacgcagcgggaaaaagaattcgcagctggccagtccatcctcaccataaccgcccatgcagacacagcccggatgggaatccaacggttcgatctccggatgcagttcaaactcattcggaatcagatactggcactccttgtgtccaaatgcctggtacgtcacgtccacccagttgcccggaacaattctttgaatcgcatggtgatccataaatccccgagatgccgcataaataaaactgttgacagtattcggcgcagcttccggcaaaagttcaatcacaattttactgccgttggccatatgtaaagtcgctgtaggatgtgtattcataggtatttgcctccataataaaacaaagaatgtgcctcggcatattcctttaaaccaacaaagcgtacttcacatcttctcagatgcaaagtacactttctcttatttcttcacttattcattgtatcattcttcaatatctgatgcaagcccggacaagcgcccaacaaattaaccgataatctgaagttcctttggatagtgattcagcacctcacagccatcctctgtcaccagcaccagatcttccacacggacacctgtatcatctgtcagataaatacccggctcaatagagaaaatcatacccggaacggctttgtctgtattcacagaagaaacatcaccaaactcatgctctgaaagtccgataaaatgacccagacgatggttaaactgcggaccgtagccttcatcagtgatcagctgacgggctgtattgtccaattcacaaagaggaatgcccggtttgatcttggcaatggccgcttcattcgccttgcggactgtttcataaatatgacgatgttcgtcactcacttccttgaagtagaaagtacgtgtcatatcagaacaatagccctttctgatgcatcccacatcaaagaggacacagtcacccaccttcaataccgtattgtccggttcatgatgcgggtctgctgcattggcaccaaaagcaaccagcggttcaaaggagtaaccgtccgcacccaaatccatataaatcttcagcatctggtctgccagttctttctctgtaacaccttcatggacaatggccttgaactgtgccatggccttgtcgttgatgtctgaagaaatacgcatcagttcctgctcttcttcatccttgatgcctcttgtattgtccacagccagagaagcattgacaaacccggctgctgctttcatctccatcagcggcagcaaaaatcttgctttcagttctttatccacacccagaggtgcatctttgtcgagatacttggccacgatctccatagcaggatctgtgtcggaataccataccttttcaatacccacttcctgaggtactgtaaataatctgttcaggaaaaaggcatgatggccgtcttctctcagatataaaccataaaaacgttcaaaaggtgacacataaacaccggtgagataataaatggacatcggatcaacgatcagcatctgatgcagtcccatttccttcagggctgccataattctgtctactctattctgcttcatagcaaatgctcctttcaaatcttcatctgccgtcaagtatatcactttctatagcggttttctatagtttatctgactttcgtaaattttattattaacgcatcaaagttttcaacgctttaaccgcattttctccggcaattcggcctgaattaaccgcaaagccgaaaccgtgtccactcatgacaacattgtatacgtccgcatctgcgccgccgaaatccacaccggctacataaagattctcaaccggtttgtaatcaccgcctaaagcttcaaagcgttcattgacacgaataccgccatgggtgatcagcatgtcttctccggccttaatggcataataagggccttcctccatagacagcatataacgcttatccttggcaaaccaaccgtctcttcctgcatgacagaatgcattatactcttccatagacgccttcactgtctctgcatcacagccgataaaagcagccaatgcttcataactgtctgctttgcagagcacaccgtccgcaatggcctgctccatggtagtatccagtctttcttccacattcggcggcatatgaatcgtctcaatcatatccttgccgtcgctcagggtctggtctaacagtgcctgattgaaaacaacccatacctgaccatccggctgacgcaggcaggcattaaaggatactgcgaaattatacacaatcccttcatctgcaaaacgttcaccaaaacgattcagccacacattgtatggtttgcctaggaaaagattcagcgcatcatatcccttaatcttcggtgctgctgcttccatggtaaagttgccttccacttccgcacccgcctcaagtgccattcggataccatctcccggatgacgcatgccgccgccctggcctaccagttcacacttaaatcctgggtaatatttttcaaccatttcatcgttgcccgcaaaaccgtctgtacacagaatcaccttctgtgccttgatcaccacttcgccgtccttcgtctcacacacagcgccgcagacactggctttttcgtctttaagtaaagttttacccttggcgcctgtgagaatgcgcacgcctttttcttcgcagattcttttcagattgcggatgacgcaatgccccacattctcctcagcctctgtaatatgaaaaacctccggtgtctggttcgggatatgatgcaccacgtcgcagaattcaacacctctatccatcagccaattgacggtatccccactcttgtcaatcagtgtacggataatcctgccgtcaatcttccaatgggaataattcatacaatccctgaaaatctgatctctgtccgcaaaaacaagcttcttgcgctgtatcttgctgtccacaccaaaaatgcctctcgggaaaaggccgtttccgcccaccgccgcattcgcttccgcaacggttacctctgcacccatctctgctgctgcaacagccgccgccatgccggacgcgccgccgccgataatcaaaatctctgtcttcaattccatgccagaacctcctgtagtcattttattttcctgcacttttattaaaaatgcaccagctaatagccatctgaaagcactttataaaagtccatctttacagtacatttttgatactaagtacatgatacatgctgcactcaaacttgtcaattacgcagaaatatctaacatagtacgcccaagcataccgtggaatttcatcttccgctcatcaaaattatcatagccagatgcgaaacacacacatcaaaaagaccgctgcctattcgcagattcatagcaggtgctgcgattgtggtcggtacttaggtggtgtcttttaccaccttatgtaccgctaccagcaatcggcaacgcaagtatgcctgctatgaactgtaaataggcaacggtcttcgtaaaatattgtgtttcgcagcgtcaattataattttagaactgttttcgcaatttcggatccagcagatcgcggagtccatcaccaatgaagttggcccccacagccattgtaaagattgccaatccagggaatcctgccacccagaatttattgaagtactgaacaccatcagataccatcataccccattcaggtgttggcggagcagaacccagaccaaggaagctcaatgtggagaacatcaggatctgattaccgatatccgttgtcgccatgatcaaaacagaagtaatactgtttggaatgatttcctttaataagatacggattcttgacgcaccaagcgcttccgaagcagtaacgtattcattttcacggacgctcagcaccacgcttcgcatgacacgggcataagacggccatgcaacaataacaagggcaaacatggtgttaaacagattggaacccatgactgcattgataatcattgccaggatcagtgacgggaaagacagaatcatctctgaaagacgcatcatgacattgtccacagcaccacctacataaccggcaatagcaccgtaaatcgtaccgatacagcctgcgatcacaaccgtcaggcagcctgccagcaatgaataacgtccgccgtagatcacacggctgaaaatgtcacggccaaagttatctgtaccaaagatatgcgccgctgaaggcgcttttaatctcagggtcagatcctggacaaccggatcataaggtgccacaaaaggggcgataatagccatgatgatccaaaacagacagatgatgacgccgaaagtgaaaagataattggacttaaacatttttttcaaagaatgtaacatctaactgcacctcactctcgggtcaatgataccgtacaggatatcgaccactgtattaataatcatataattcagcgcaatcagcagcgccacgccgataatcgacggatagtcattggacaggacggactgatacgcaaactgaccaactcccggccagttgaaaattgtttcaacaagtaccataccgccaaggagattgccaaaaccaagaccaataaccgtcagtacaggaatctgtgcattgccaagcgcatgatggatgatcagtcgaacatttgacagaccttttgcacgggctgtacggatataatctgtggacataacatccaacagattggaacgtgttgttctggtgatcaggcccatagtaaaggcagccagaactgtacccggaagaatcagatgtctcagggcatccagtgccttcggaatatcaccctcaagcagactgtcgataacaaaaaatcctgttactgtctgcggtgcactgaatgcattgccaagacggcccggtcccggcaagatctgcagtttgtaataaaagaaatacaatacaagcagtgcgaaccagaaacttggcaggctgacacctgtaacagaaatcgcacgcacgatctgatcaagaatactatttctcttaatcgcagaaattacaccaaataaaataccaaacagggttgccagaatgatggcaaatactgccagttcgatcgtcgccggatagcagcgtgccaattcacttaaaactgcattgttggtacggatagatgtacccagatcaaaatgcagcagattcttcatgtagtatacatactgcacaataatcggctgatccagtccgtattttgccttataggcggccacaatttgaggatcacccaatgctctctggctcagattggcggttaccggatcgccgggaaccagttttgtcaatataaaaaccaacgtcgccacaccgaacagcataatcacaaggtatacaagtctttttcctataaacttcagccgttccatacgacacctctctctctttcgttttagctttccgacagcagactgcgcatcgcttatctgccgccaaacatctgatgaacagatatttccgtcagtcaactgttgcctccgaacataaaaaatgtcccgaaccagccgactcacggcagcatctgttgccgtcctgtttaaaacccacagggcgcagaagcgatttccgcgccccgtggagaaatcatccgaaaatgatggattatttgattgtgatctgtgtcagatccagtgaatatggatctgaagcagcgacaccgtcaagtcttgtgttgtatgcaatatgtgcaggtgcctgagcgatcataagccatggaccattctcatatgtatcgtcctgaatcttttcaagaacagcaatacgtgcatcgttgtctgttgcattcagtgtatctgcgtaaagctgagccagatcaggatccatatctgttgtccagcctgctcttaaaccaacggactgacctggaaggaattcaagctgtacgttaggatcgttgtaatctgttgaccagtacataactgtgaaaccgatcttgccgtcacggtaatcatcgccaaaacctgctgcccatggctgggaaacgatattgacattgatgccgatctgagaaaggtcatctttaaccttctgagcaagatctgtcagaagaacaccttccatatcaaggtcacaaacaggcatgtcgatatcaaaaccatccggatagcctgcatctgctaaaagctgttttgcttcgtcaatattagtgtaatctgcagggcgctgtccttttgcacccatgaaaccatcctggatgatggaataaggtgtctctgcgccttcaccgacgattgtctggatacctgtgtaatccagtgctttacggatagcctgctgtacctttggattagaaacagggccgccgtattcttcgttcatattcatcaaaaggaaaccaactgtctttgttgcagtgttaatcttggcaacattgtcgcctgtcagttcagacattgtatcatctgtcatgttcatggcaatatcaaggtcacctgaagataatgtcatcatctgtgtattggcatccggctggatcttgatgacatatttatcaacatttgtagactcaccccagtagttagggttcttctcaagaacgatttcagaatcaggtgtatagcttgtcataatgtacatacctgaacctgcacttgctgtgtcaagataagcctgtgctgtatctgttgaagaagcgtctgctgcatctgtaccgccatgttccttaacaaccgcgctgtcaagaactgccagtgagctgtatgtcaacttggaaaggattgcactgtcaggctgtgtcagatggaaaacaactgtgtaatcatccggtgtttcaatgctgtcgatagtatcgcagatgaaggatggattaccctgaagattcttgcaacgattaatactgaaagcaacatcggcagatgtcatcttattgccgcttgcaaaggtaacattttctttcagtttaactgttaaagtcttattgtcatctgagaattcataagaatctgccagacaaggttctgctgcaccgtcattactgtagaacttgaaaagattctcataacatgcattaataacaagcggtggatatttctcgtaaacatatcctggatccagtgtggagaatccggcaccgatcgccactgttactgttgtgtttccgcctgctgctgaatcgcttccggcttctgaagaagcagcatttgtctcgcctgatgcaggtgctgctgcgtcagatgaaccgccgccgcatgctgtgcagcttaagactacagcaatgcccagggccattgctaaaaatttctttttcataaccttaacctcctaaatagaaatttcttatgtatggtgattgcgaaatactccgttatgtaatgcctacctgtttgtcggccgtttccgcaattatcatcaaattaaaaatcattcatacaaatggcaggccacataatgtcccggcgccacttccttgagttccggtgccgtctgtctgcacttgtcgcaggccttcggacatcttgtgtggaaatggcatcctgaaggcggatcataagggctcggcacttcaccttccagatgaatacgctccttctgttcttcctgatcaacctgaggaatcgctgacagcaatgcctctgtataaggatgatagcgtttttcataaagctgatcgtaattggcgatctcaaccattttgccgagatacataacgccgacacggtcactgacctgataaacaacattcagattatgtgaaatgaagaaataggttaatcccagtttctctttcagttcctgcaaaaggttcaatacctgtgcctgaacagaaacatccagtgcggataccgcttcatcacagataataatctggggttccagtgccagcgccctggcaataccgatacgctgtttctgtccaccggaaagctcatgcggatatcggctcagatgataactgtccagccccaccagctgcagcagttccataatcttcgcatccacatcaatcttgcctttgaggttgtgaatttcaaaaggctccatcaaaatctgcttgatggttcttcttggattgagacaggccgaagggtcctggaaaataatctgggcttccttgcgcatttcctttaactgtgcacctttcaaacctgcaatatctgtcccgtttaaataaatatgaccatctgtcggctgctggagtctgatcagtgtcctgccaagggtactcttaccgcatccgctctcgccgacaacaccaaaggtctcacctttcatgatctcaaaggatacatcatcaacggctttgactgtctgtccccttttcttgcctttaaaataaactttgacatggtcggctttcaccagcacttctttgtcatttgctgccatcagctaaccctccttcttctcggctgcatccgcatacagccagcatcttacctgacgttcttccgacagctgtacaaccggcggctcgccctgcttgcactgttctgtcgcatgcggacatctcggccagaaactgcatcccgaaatctgctctgtcggattcggcacaacgccctcaatggtctcaaggggcggacgatcctttgtaattctcggaatcgcactcatcaggccgactgtataaggatgcttcggatcactgaaaagctctcgaacaggggctttttcaacaattcgtccggtatacataacaatgaccgtatcacacagctcactgacaacacctaagtcatgggtaatgaagagaactgatgtattcatctgctcattcaaacctctgatcagatccaggatctgtgcctgaatcgtcacatcaagggccgttgtcggttcatcggcgatcaaaatctgcggttggcaagccaacgccatggcgatcataacacgctgtctcataccaccggacatctggtgcgggtactcatgggccctcacttccgggttggcaatccccactgcctgcatcatacgaatggcctcttccatggcctccttcttattcattccgcggtggagacgaagcgactctgcaatttgcctgccgcacttgatgatcggattcagggaagtcattggctcctgaaagatcatggagatctcattcccccggattttctgcatatctttctctgatttcttcacaagatcctgtcccttataaagaatctctccgccgacaatctcacctggaggattcgggatcagctgcataataccaagagaagaaacactcttaccgcttccgctctcgccgacaatgccgagcttttcacctttatgtaatgtataattcaaatgattaatggctttgaccgtgccttccacagtcttaaattccacgcataaatctttgatttctaatattttctcactctgattcatggtctgatcacataccttccatttatccatcaaactgcatcatctattcacatcgtgtcaatgtcttcttttgcataatgtgactgtacactttaaaacgcctttgtacgccaaatcactttcgcacttcgatgcgccaatacgttataagtatgtctttttacagttttttatatgtataacaaaaaagataccatactttatttcagaattcaacacaattctttcacaaatataaaaaaatcccctagtgttcccagaggaaatacttatgaaaacttttttgagtacagccccaaaatattaaaaagtgttttcacaagaagaatacattgtctgaattatgatatactaaatgtgtatatgtacagataaaattttattcataatgaatatttcatttattgaggtacctaactatcccgaaagaaggaatttatatgtcttttttggaatatcttctccgactgacagcctggccgatgacaccgccggttctttacgggccttttcatttgctcgcagcctttggcggaagcgctgtggctatttgggctgcatggcttttctcccctaaagatcatccaaatacaaacactcgtattcatcaacagaattttgaccgaatcatgctgatttccggtgtaattcttctgattggcgaattatataaacagctgatgaatttttatgttgtcaatgaccacgtttatgactggtggatttttccatttcaactttgcagtctccccatgtatctgtgtcccctgttgatcatgatacataacgaaaaaaggcacagaattctctgtacctttttgcttgatttcaatatgatgggggctgttgccacctttatcgacccctccggtatttttcatccgtactggatgctgacactgcatggcatcctttggcatctgatgttgatttttgtcggattcgtcattattttcagtcacgaagccgatcttacaaccagaggcttccttcggacactgccactttttgcctttttctgtctggcagccgaagttctgaatggcatcctgcatcgcttcagcgccgccaacctgttctatatctccccatgggaaatgtccacccaactgctctttggcgatatcgatcggatactcggccgtccgataggcattctcctgtacattcttgcgatggctgccggcgcctggttcattcataatattgccagaaagattaccgctgtctgtctcaccgccaaatcactttaatatttttcatccgttatacaatccccgttatccgcatcagataaataccaatcgtcataacaataacggaacacggtactgaggccagtatggcattggccgccaggccatcgtcgccgcccatgctcttggtcataataaacacattcatggccgtcggcactgcaaacagaacgaacaccgtcacgatttcttccgtcggcatacccaggaaaatcgccaacagtgtcatcacaaccggcccaaggatcaacttgaacaatagtgccagacggatggcttttccttctcccttgaccgaattatccaccattctggctccgatcatcagcagtgccatcggtgttgagatggctccgagataagtcagagatttctcagccgcataaggcaacggaagtccggtcatggcatagagtacaccaaaaataaccgccagaatcatcggattctttaaaatatttaaaagcagcttccccggcttcatgcctgacatatcgccactatatatagaaagaatcagaacacccagaatattgtaaaccggcatgataaatgtcagcacaagcacagaacaggccacatgatccgtctgaagaatattctcgatgatcggcaatccgatataaatataattgcctctgtatgcactgtgtactgctgctgcaaccttccttccgtcatgaatacaatggctgatcaccagccacgccaaaagaaaaacgccgatggttccgccgactgtcacaaagacaaatcggggattcatcagctcagtaaaatcacttccggccacgtccagaaacatccgggccggaagtgcataataaaacacaacattggaaatagaaccgacgaaatgctcatcgacggttcctctccgccgcataaaataaccgatcgcaacaacaataaaaacaggcagaatggtattcacactaaaaatcaggtcattcaacatttcgcccatagcatttctcctgttttaaagaactaaaaattacaattcgcagttgttgactgtacgtgggaatgggataacgtctctgatattgcccatacctgtcaggtacatcacgcatctctcgaaaccgaggccaaaacctgcatgacgtgttgaaccgtattttctcaaatcaagatagaagctgtaatcttcctccttcagacccagttctttcatacgtgtcagcagcttgtcgtaatcattctcacgctcactgccgccgatgatctcgccgataccaggcaccagcatatccatagcagcaactgtcttgccgtccggattctgtttcatatagaatgccttgatatccttcggatagtctgtcacaaatacagggcgtttgaagatcttctctgtcagataacgctcatgctctgtctgaaggtcgcagccccagctgactttgtaatcaaattcatcattgtgcttctccagcagttcaatggcctctgtgtaagtcacacggccgaaatcagaagttctcacatgctccagtctttcaagaaggcccttgtccacaaactgattgaagaacttcatttcctcaggtgcatgctccaatacatagccgataacatacttcatcatactctctgccagttccatatcatcctgaagatcagcaaaagcgatttccggctcgatcatccagaactcagccgcatggcgggttgtgttggaattctcagcacggaatgttggtccgaatgtgtaaatgttgcggaatgccatagcaaatgtctcgccgttcaactgaccgctgacagtcaggttcgttggtttgccgaagaaatcctctgaaaaatcaaccttgccctcttcattcttcggtacgttgttcaggtccatcgttgtcacctggaacatctcgccggcaccttcgcagtcactgcctgtgatcagcggtgtatgcacgtatacaaaatctctctcctggaaaaactgatggatcgcataagcaataagagaacgcactctgaacacagcttcaaatgtattggttctcgcccttaaatgtgtcagtgtacgaagatattcaaatgtatgtctcttcggctgcagcggataatccggtgtggaagcaccttcgatctcaactgtctcagcctggatctcaaatggctgcttcgccttcggtgtagccaccagctggcccttaacgatcacggctgcacctacgttcagatggcagatgtcgctgaaattcgccatagcatcatggaaaacaacctgtaaaggctcaaaataagtaccgtcattcacaacaaggaaaccaaatgtcttggaatctctgatgttgcgcacccagccgccgatttcgactgtctgaccgagataattgtcgcgatttctgaaaatctctctgattgttgttaacttctgcatataaaattcctccgaattgattttaaaatagatgataatacgcaattacttttattctaccacagctttccgcaaaataccatgaaaaaacagaggtgttttcatattaaatatatggtatactgataacagtttttaagaaaaatcatccgaaggaggttcgcgcatgcacaatcgatcaaagcacacatactgtgcatccctgttcttcctgctattgatattgctgtttggcagttcctgccttctgaccggctgttcaggcggcacctcatcgaaggcagaggcaaacgccggccactccggcggctcgaatacagatggctccggcggatccggttcagacgcagacggctccggctcagatgcagacagttccagccaaaagcgtgccgatgcctatgcctcccttgttcccaccgcatccggtgagacatgctatggtgatgacagcgtttccattgacgcctccaacatttccgatgggtatgtgatgatccgctacacaggccgctccgagaaagccaaggcccagatcaccattcccgacggtaccgtctatacatacaccatcaaaggcagcgattacaacacttttccgctgaccggcggcaatggcgattacaccctcaaagtctatgaatgggtagttgacaacagttacgcccttgccttttccaaggatctctccgtcagcctcagcgatgaattcaagccatttctctatccgaatcaatatgtctggttcaccggtgattcccaggtcgtcgccctgggcagagaattatccgaccagtctgccgatgatctggactacgtgcagaacagctattactatgtgatccggaatatttcctatgataacgataaagccgagaatacacccaccgactatgtgccggatattgacacgatactggaagaaaagaaaggcatctgcttcgactatgcctctctgatggccgcattgctgcgctcccagtccattccgacaaaactggaagtcggttattccggtgaagcctatcatgcctggatcagtgtttacctcacggaatcaggatgggtggacaatattatcgaatttgacggcaaagactgggtactcatggatccgaccctggccgccaacaatagttccaaagccgtagccaaatatatcggagacggcagcaaatacactgtgaaatactcttattaatcctgcattcacagttttcctgtcaatctgtggatctatacaatatcctgcatttatggagggaatgatcatgaacaaatcaccacaattaaaaccactttccaatccggaactttcttctttcagcagccagttatctctgatcctgcgttccggtatatctgctctggaagggatttctatcatgctggaggatgcatcttcagaggaagagaaagccattctcaacgcactctcagagaatcttcaggaaacaggctcattgaacgaagcattggaacagacacagctttttccggcttatatgacacgtatggtccggatcggtgaagagaccggaacactggacgatgtcatggccgccctcggcgaccactatgcccgtgaagataccattgcccgaacgatccggagcgctgtcacttatccaatgatcattatcagcatgatgatcgttgttatcctggtattgatcatcaaagtcatgccgatcttcaaccaggtcttcattcagctcggttcggagatgtctggattttccagagttctgatggacctcggcaataccatcaaccgctattccgttgtattcattgcggttcttgcagtcatcgtcatcggcttttttgcctacaaccacaccgccaaaggtgccgctttcttaagagggctcggcagccatattcctgctatccgacgcatgcatcatgatattgcatcatgccggtttgccagcggcatggcgctgactctcaaaagtggcatggctcccgaagaatgtctgagccttgtccgcgaattaaatgatgatgaagcctttcagaaagagctgaccgaatgcgaacaattactggaaaacggtacagattttacagctacactccatcagacaggtattttcaccggcgtctatgcccgtatggcttccatcggcttcaaaaccggctcactggatcaggtgatgtccgatattgctgaactctatcaggaggatctggataaccgtatgagcaatacattatccatcttagagccaacccttgtcattgcgctctcacttgttgtcggtttcattttactgtccgttatgcttccgctcgtcggaatcatgtccagcatctaagtcaggaggcccacttatggtacgatttcaaaatcaaaagaaaagccggaaaaaccgccgggtttttctgtccatttgtgtttttctggtcattcttctgctttttatctccggcattgattcattttcggacagcacccgccgtcatcagaaagaaagcctggagcgggcattaaaccgcagcatcatctattgctatgcaacggaaggcacctatcccgaaagtctggaagacctgaaagcgcattatggtctgacctatgacgaagacctctttttcgtagattatcagaccgtcggtgccaatatttatccggatgtgaccatcattgaaaagggggcaggcaaatgagatttcaatccaggaaacatcatatcattgatattttatttcccatctccctgtattttgttttcactgtatcggccctgacagtgcttctgctggccacgaatgtttaccgtacaaccactgagaactcggctttgaactttaacgccaacacttctctttcctatattactgagaaaattcaccagaacgataccgaaggtgccgtatctatcggcagttttgacggtcatcaggcactgattctgaagcagcattacaacgacacggaatatgtcacttatatttatgtcagtgagggaaatctgatggaattgtataccaaaagcagtgcagatgtcgatgtcggctcaggcaaagtcattctgccgctgcagtcattggatatggagatgtctcaatcggatctcctgcatttgacatgtaccgatgcgcagggacacaccgttgcgtcctatatcagcatccacagtgagtcatagcacctgtcacgggaaaggaataggattcatatgaaatatcaacgtcacaataatacatccagtctgtttcttctggaacttatacttgccgttctgtttttttccgttgcaagtgccctctgcatccagatttttaccaaagcccatctgatgagccaggatgccagggatctgaattttgccgtcaatgaagtcagcagtatggccgaacagatgtctgacggtacattgcaggatgccgccgcctactatgacagcagctatgcatcctgtgaaaaagcggatgccgtttatgtcctgaccgtccattatgaaccgaaagatacccttctgaaggcccatatttccatggataccatcgccgacacccggaacatctacacactggatgtcactaagcaccgacaaaggagggccgaatcatgagaaaacagtcagaaaaagccccggcacctttttttaatatcggcgcctcttctctccttgtcatcttcctgatcctctgtctggtgacctttgccatcctgacactgaccagcgccaaaagtgatgccgactttgcagagaaactggctcatcacaaaatgaactactatgcggcctgcaatacggcagaaagcaccctggataagattgatgccgtcctggccgatgcctggcagctgtcagacaccgacactgctgctgtcttcactgaaatcgagacccaattgacagcactcgatagccgcgaacagctgcagctctccatggattttacacagagtgaaccaaccatttcttatgctgtcgccatcgatgacaaacagaacctctgtgtcacgctgacactgaccgcagcgcctgccaaaggagaggcttactaccgcatttcacagtggcaggttcagtcttccggtgagtggaagggcgatcagactttgaatttaatgaaataagatttagcaaaaaccaaaggagatttttatgaacgccagagaaatacttgaacaggccgtcagagaagatgtttcggatatttttatcgtagccggacttcctatttcatgcagaaaaaacggcaatatcattcagacacaggaagaaaaactcttcccgaaagaaactgaagcattattaaatgagatctatggcatggccggagaccgtgatatgatgaatctgctggtccatggtgatgatgatttttcatttgccatacccggggtttcccgttttcgtgtcagtgcctacaaacagcgcggcgctctgtcagccgttatccgtgtcatcacattccagctgccgaatccacaggaacttggcattcctgaagctgttatgcagtttgccgatcacaccaagggcatgatccttgtcaccggctccgccggcagtggcaagtccaccacccttgcctgcctgatcgaccgcatcaacaacacgcgaaatacgcatattattaccctggaagacccgctggaatacctgcaccgtcacaacaagagcattgtcagtcagcgagagatcaagattgatacggacaattatgtcaccgctctgaaagcctcccttcgccagagcccgaatattatcctgctgggcgaaatgcgtgactatgaaaccatcagcgttgccatgacagccgccgagaccggtcatctccttttctccacgctgcacaccatcggagcagccaataccatcgaccgaatcatcgatgtctttccgccaaaccagcagcatcagatcgctgttcagctgtccatggtcttaaatgccgtcatctcacagcagcttgtgccgacggtagacggacaaatggtacctgccttcgagattatgagcgtcacaccagctatccgcaatatgatccgcgacaacaaagtccaccagattgacggtctcatcgccacatcggccaaagatgatatgatctccatggatatgagtctgatgaacctctgtaaacaggacatcattacaaaggaaactgcgctgacctacgcatccaatccggaaatgctgaaaaaaaggctataaaaataaacccgtgttttccatacagccaaatttgtcaaactggaaaatacgggctttctcttctgtaaacagaattcttcttgccgaacaactaagtaacctgttcacattttctatattctttatcattcgttaatgtcatccattctttaactgtttaaagatgaaattccctgaataattgttcctgaaattccttattattagccgcttttataatgtcatcttttcgattctgctctgataaaagaataatcaactgattcattttgtccagactttcccgccttccaatctccaggccctcttttcggcctgccatccgttcttcactcatcatttcctgcagcagcatatattttccctcccagtcacggtcttgcttaatgcttttaacccgttcctgcaacaatcgcaaataagcatcatctgtttttacattatcagtatcttgcccgacatattccagaaaattcactaactgtatcggtacatcattaagatttttccctttggtactgagaataatcgtatgattgccatcagccaacagcttattcgtttcataaatcatatttctggctgtatatcgatacaactggtcaccaaacgggtcaaaatcacaaataaaaataacgtatgtatccggcagtctatcgtaactctcacctgtcaacaatgcatccatatccatctgtgcatgataataacgacttcttttgctcaatgcagtctctgtcttgacttgcatctccacattaaatcgtcggtgcatccctcgttcttccgccaacacatccagccgcacaccatgatattctggatgataactgagactcttttcagcaacaacatctacctctaaaatatccatctcaagtataagtgctaataaaagcttgcattgttctgcatcggacataactgccgcaaacataaaagcatctttaatcgttaagtcctgtaattttttcatctgattcctcctgcttcaaacggtaagaagaatcctgtaattttattatacactacctcagcaaaaaaacaaacaaagtaaacacatttttctttgtaatctcattcaaaggacaaaaagattcatgtcattatcactgttggcatcgcccttcgtgataaaattacccatagccgcactgttggataccacacgatgagtgacaatagaaccatccgcatccgttccatagaaagcaataacatcctctgtctggatctcttccggctggatatacttcacatacaccagactgcccgtcggtatcgccggttccatactgccgctgatcactgtgtaaatctcatagccgaaagctctcggaaccgtaatgggaagatatgccgccacaatgatgattaatatttctttacaacccatcttccgttcctattggatccctgtctttcgactagcccttcctcgcgcaaatcctttataatcttctgaatctgctttctcgataaatcaaacgcttccataagtttaacctgagttatttctggattttcttccaacttctgcaatatatccagctttctttcggctccttttttcggctccttttttcggctccttttcggctcccttctgaattagacaacgggtgtaatttcggactttttgtcaatttttctgctaaaaaaggctgaacgctaaatctaccagcgtccagcctcttattattcctctttttctctcttaccctgcagcaccgccgccagtatctccagcacgatggccaacccgatcatggaaaccgctgcaatcttaccgtttgtaccggtaatcgtctggaagatgcctcccagcttcggcacagacaactgcacctttcctatgtaattcgcatatgggattggattcatgtcattatcactgttggcatcgcccttcgtgataaaattacccatagccgcactgttggataccacacgatgagtgacaatagaaccatccgcatccgttccatagaaagcaataacatcctctgtctggatctcttccggctggatatacttcacatacaccagactgcccgtcggtatcgccggttccatactgccgctgatcactgtgtaaatctcatagccgaaagctctcggaaccgtaattggaagatatgccgccacaatgatgattaataaaagagtgcccagtacgctgcatactgcagccaccgggcttttcttctgcctgttgcgtctagccaaaatcaaattctcctttgtcagcaggcagtactgttctattccaaacagtactgcctgctgttacttgtctttcaataatgtctatcttgaacgtttcttcagataaacaaacaatgctgccaacgctgctacagaaagaataccaatggctgcaccgcctaccatcggcaatgtattgctgccgtcttctgcatcaatattggactttggtgtttcctcgtcatccaagtctaccagtgtctccggtacctgattatccggaatatctgtcgtctggttatcctgattatcggcatcctgaccgttattctgattgtctgtcgtaccgcctgcattggtattggcaccattagccgtattgtcgcctgccgcattgttcgctgcgtttgtaccattcgcagctgtacctgtcgtaccggttgtacccgttcccgtcgtaccggttgtacccgttcccgtcgtgccggttcctgttgtacctgtaccggtggttcctgttgtcgttgtcgtcgttgttggacccggaacaatggttgtcacagttgttgttgtctcaacaatacgatctgtctcaccaggcgtataggtgaatgtaaatacattctcgctttcattatcactcaaagtcttggtcaaagcaagggcctgagggatataattctcaatatacttataagcaaccaccggcttatcaccggcattgccataaaatgtctggctgtcggcaagggtcttgccattggcatcctgatagttcactgtgtaagccaccatatcgcctttgatgccatatgcaacaacgtaatccacatcgccgtccacctcgattgtcggtgtggcaagagcttcttcattgtcacgtccgctgagacggaagcctttaacataatacttgtcatccgttaccttgacgctgttgatgtccaggataacctgtgaaccaagggaaagacctgtgatctctttctgttcctgtccgtcaatcgtgcctttattgcccgcatataccgttaccttgtaggtatatgtatctgccgccataacgctgaatgcagaaccaaccgtcagcactgctgctgcaagaagagatacaaataattttttatattttttcatcttagttctctccttccctgtgctgtcttgtttttctggaattgttcaaaaggataatgcctgcgatcaggaagatcagaccgcctacaagaccgatcaccgaatacatcagcaaattggatgtatcaccggtcttaacggcttttctggaggttgtcagattgttcttctgaggcaccttcttctcgatcacggtgttcttcttaatggtctggccctctttgaccttctcaactgcgaaagtcatacgaagcttcgccagtgtctgctggtagccgttattacctgtctcgccttccacgccgactttcagataaacagtaccgctttcacccttggccagtctgccaagatagaaatattcatccagtgaggcatccgcctgtttcagaccttcaccggctgcggaactgccttcgccgcccactgtgctgctgtcatataaaactgtttctttgttcttgctgtccacataggtcagacggtattcataagccgcgcctgatgcggaattctgtgcatcctccaatgtctgaagaacttcattggtcatataccagtctgtattgctgctgtcctgattcgtcagctgaacatgcagtgtaatactgtcacccggctggatctcagacatagaatccgtcacatcttcatccttgaaattactgttcagcttgctgccgtcaaatgttgcctgccatccgtcagcgccctgataatctctggcaaatgctgtaagaggtgccccaactgccagaatcgctgccatcatgaggcacaaaatcttcttcttcatactctgtacctcctattaaaaaccaatgctggattcatcatcggatacgctgacatccacgccccaggcactcttgatagccgctttggcattgtgcgtctgaaccgcatcaacttctgcatccagattgaatgaataaccgtcgtatttgtactgataagtaacggtggaaccatctgtcaccttgttcacctgctgtgccacggactcatcgatacggatcgtatcggaaagtcccggtgtggtctctcccggtgccagtgcctttgtgtaataaagcaccatacgttccggtgtggactgatcctcggcaaccacccatccgctgttctccggaacattcagttcaatgaggtccggtgaaagctctgcattcttcctgccctctttgtccttccagctctttgtgataatgactctgacaaatgtatcaatatcgccgctgttagtcacgctgatggcttcatcatactgtttgcccggtgtaaacttctctttctcaccaagcatattggccagaagcttgccctctgtattgccgctccactcattgccggaaacataatctctgctgctgacaacctggccgttctccaccagagaaacaccgatatgcttcagattcatctgtgcggaatagttctcactgtagtacgtcagcgccgctcttgtgctgcctactgtactgccaagcaaaagtactgccgctgctcccagaagcagggcaacttttttcggaaataaaatcttattcttcttcatgatagccctccttctattctgctgtatctgctgtgatcacattgttccagtctgcataagcggttccgtctgccttgtaaagcaccggtgtacactcttccacaacaatgacattgaattctgccggtgcatcctcactgtctgttgccgggaacgtgtagctgacattcagcttcgttgctgttgtctcacctgccggaaggatctgatcgtaataccagaaaccatcgccgccgtctgtccatcctgaatcctccggctgataactcagcgtgatatcagatggcgcaaacgctctcacacgaacaaaacaatcataatcgcctgtattctcaactgaaacatgtttgcctctgctgtccacttcttcatgcgggattgtctgtgtaaatcccatattcatctgaacagaaccgctggcagttgaataggtggtgaaataagccatcgcaccgcccaccttcagggtacccacaagaacaagcgctgtcactgccatcatcaaaaacggcttcttcaattgctttttcatttatcgttcccccttcctagtctgtgctgacattatcgccagtgtactgatactgtttattttcatcaagtttgaaattattcttcacgccgtaaccgccgtttggacggccatcgtgtgcattctcaaatgaaacgcggaccgcttcatctgcaaaaatcgtcacatcatccggatcatcggaaacctgtgtgtagcttgcgccgctgtaggtctctctgactctgactgatgcacctgccggaatctgatcaatggtcagctgctgtgattcctcaccggcccccatagtcatcgcttcaactctgctctctgtcttaccctccagggtcgtaatatcaatctggaaaacaaatgttgcctgagcaccggatgtggcattgaaatctctcaacgtcttgtcgatcaccagagaaccatatctcggtgtctgttccggcttgagaactacttctgacaattcgtatacccattcatcatcacctgtctgataataataattattcggcagggaaatcagatacggtgtaaatgtgtactcataattcgttgtctgtgccttatccgccatcaccaggtaaagtcctgtggccagatcctcagcctttccctcaccatctgtcagcgaaacctctgctgtcggcttcgtactgtctgtcaccataccgaccgcctctgtggcccgcttcagccattcatctgcggatgtactatcggatgcatccagcgcggaaacgtccagctgtgcaaaaactccggatgcggtgtaatctccgacttcactgatatccgccaccttatacagcttcacatccaccgttgttgtacccagatctgcactgaccttgtcatcaccgccggtcttaaaatctatggagcaatcctttttgccggtgtccaccatattcgccgcatttgctttcggcagaaccgcaaatgctgataatgtaagggcacatgcgatcaataatgcgcagctcttttttatactctttttcatcatcgcttcataacctccctcttcaaatccagattactctttaggttgtttatttttcttcttttttgataaaaatctcaaaagcaggatcaccagtaaggtaacggccagaccaagaatcgtatagatcatatagtaattcttaatcgattcgaccatggactcggaaatcgtcgcctccttgtcctcctcaccgttgtaagccactctcgttcccctgacaaggagtctgtgagaattgacaccatacggtgtacaggtaaataatgtgacctgatctttgccttcctcaatcttcaatgcattctccagtgtctcatgatcatccttatccaccatcggcagaatctgatccacttcgtaggccagaacctgatctaacacatggatataaaacttatcgccatttctcaactggtcaatatcggtaaatagcttggcactgggaagtcctctgtgagcagctaccacgcagtgggtactctcaccgccaatcggaagctttgtgccgtttaagtgtccaacacctgtctgcagcacatcatcggctgtcccatggtatatcgccagtttgatattgatcttcggaatagaaagataacccatgatgccgtctccggcttcattcaataccttccagtattccgtactctgtaaatctgttgtactctcgccaaacacatcactgtataggttgttctgggtgattgtcgcattgaaggcttcggccctttcccactcctgtgtaaagtcctcaggtgtcatatcctgcacgacactctgatagttgctaatcagctgactctgtctgtaagtgttccattgattggataccgtcggatagatcagaatgccaaatcccaccagaaacaatagcccaaacaggatggctgaaatcttcttcttcatgagcttctactccttcttctcagtctccgtatcggcatccccggtcactgtcttgtcttggactaccggtgcctcctgtccgtctgtcgcctgttcggcacggcgcttctttaacttctgttctttcttatataataccacaataaatgctaccgtcacaagtaatcctacgattacccacaacaaataattggtgtgtatgctgataccgctgaaaagcgtcttctctgcttcgacttcctgctccacatattccacacggtgtcctctgacaagcaatcgctccgtgttgacaccatacggtgtacaggtgagcagtgtcaccagatctttgccttcttccactgccaacccggaagtttcctccggtttgaccactgaaatcttatccacttcgtaacacaacgtctcatttaaaacatggatcaggaaatggtcaccctcttccagtttgtcaagatctgtgaaaagggatgcactcggcaggcctctgtgagctgaaataactgcatgggtgctggctccgcctaccggaagggaacttccttccagatgtccggctgccacctgcaagacatcttccctggtggtatggtagattggaagcttgatatcaatcttcggaatctccacgatacccataataccgtcacctgcaatgttcagacaatccatgtaggctttgtcttccccttccgtcgcctctgcaatggcaaaggagtccggcagaatgctcggtaataatgcttcattgtatgcccttgctttttcaagctctgctgcataatcaatctcacctgcggcatcttcagcagaaacaatagaatcataatcactgatcagctgtttctgtctgtagttgttccactgattcgctacaaatggatacagcagcaaggacaaaccggctaaaaatataatgactattaaaattttgtacgttttcttcttcatccgggttctccttattgttgtatacgtatctgtctctcctaaagagatgggttaaaaggtttctgaaaaaatgcctttaatctgataaattccggggcgggtaacgccccggaattcaccaaaagacttatttatgacttatctgttttcttttctgcggctagcgaagaataaacctgctgctgcgatcatgataccacaaccaacgattgtgaagatagttgtaccgataccaccagttgctggaagagcattaagagtgctatcttttactgtattctgagcacctgtacttgagaaattagctgttgctttttcgccatcgtacgtaagagcaacgtctaatccatcagtattaatagaatatcctgttggtgcaactgtttctgtgaagtgataattacctttatcaagaccttttacaactaatttaccattagcacctgtaacaacatcctctgaaccattttctggatcatatttgtatgttccatcagtaacttttgtaaatttaagcggattgtcgattccttcttttgttacattgaatgtagcacctgctaatgtttttgactcatctgctgcatctacttttgttaattcaatagaacctgtataaagatttacttcattaccagtaatatctgtatttgcatagtggccctttgcttcattgtttactgtaacatctgtaacctttgctgtataagtgataacaattttctcacctgcatgctcattatatgatgatgcaacgagactgctaaaatctattgtaaatgtattaccatttggaacaagagcaaaatcagctgttctatccacgtcatcaactacaattctcttaatagcacctacaccgtctaagtaataatcagcgcctgtgattgtatctgtaattgtaaatgttctattgtccgtatttgatggtgcaataactggaacatatgcttcaatttcatatgttacaatatcgccaattgctactgcattatctgtatcttttgttactttcgtcacttttaatggagactttttagcagttacagtcgttcctgttaattctggataattagcagactctacattaccaaaacttacatatgcagacattgtcttatatgtataagcactacctgttgctttaattgcgtagataccagcagaagttacacctgtttttgttttaaaatctgtaggaacaaagccagctaaactttcgactttttcaagtgcagccgcaattttagttgcatctgctgctatagacgttacacctgttgggagtgttactgtctgaccattttctctagcctgatactcaattaatccccagataattgcctgttcattcgctgttgtatcctctacattatatgcttctgcatattttgccccagcaccatttataaattcccaaccagatgttgtacttttattaggagcaataatctgtaaaatatctactgtatccgcatcctctaatccattaagtgtaatctgaacagtagtatcagcaaaacttgtgatgcccattgctaataccatgataagtgataacatcactgcaaataatttctttaatttcttcataatattctccttttctctcttatagatattatttcttggttgacatgttacgttgattttttatcctggcagtccagggactgctggttttaaagttcatccctctatttcaccagcacctccctgcacttgtttttataaataatccaggccgctgccatcatgagcagcataccacagattgagaaccagtaaataccggaaccaccggtttcaggaagtacatatactttcttgtctgcaagtttgattacaacaccatctgcagcgcttcctgtaatatttttgccatctactgttgtcagaagtccatttgtaaatgtcactgaccaatcttcatggagcatataacctgtcggcgcttttgtttcatgaatagtatatgtgccattcagattgtataaatctgttgtggaattggaattttttacagtccatgtgattgagccgcctgctttggactcaccagttgcaataactgtatcacccagtttcagttcgaattcagcaccttcaagtccaacactatttgtattggattcatcccactcttcactgactttcattgcagaccatttcaacgtattggtcatggtatatgttgttccatcctgtttaactgttggtacatagttgccataattggatgctgttgccggttcaccattatcagcaagctctactactcgatattcataggctgccggaagattatgaataacttttacccaaccatctgtatctgtaatatcttccccagtcagagtataaacatcatattcctgccaatttccactagtatccgctgtacgatactccaatctgaatttcacagagttcggtcgatcactgacattgccatcattccagtttttcttgacagtaatttttgttgtattcagcttattagtgaatataacactcacaccatctgctgcttcagtaatttcagcattgcccacctgatgataattattacctgtcaattcttcagttgctgaatgacttctatttttctttttcagaatagtcgttgccttagtccaattatcattgcctgataatgtaaagttcataccatctacattgactgacaattcattcggacgaaggcctgctgcattgtcgctgtcatcccaaatctttgtaatatgcaatttttcagtctgaagcacattggcaatatagtagttctcatctgcacagttcggatcatacgtattcttaatcgttgccgttatctgatctttaccatattcataactgatactgctctgatagtttgtcggaatattctcttctcgcacggagtaagaatatgttttctgtcccgttgaactgccttcatactgtggaagactatcccaagtttttgtccagccatttgattcattcaatgtgacggtctcgtataattttgcctcaccatcgttgacattctgatacaagctgactgtaacatcacttttcggtccatcaccaacccattccttcttaacagtaatactgcttgcagttactttctgatagttattggtaacaacagcatttgtgccgttatctgtgatactgtaagaagcttcatagtcattgatagtttcttcagtaatacttgcaatactctttgttacaggaactgtctcttggaaagaatatttgccagccttagtaagtgtaacttggcctgttgagccatccgtgtaatttacattgagaataacatcctgcgctggctctgctacgccttccggatgattccaaaccttcctataagataatgtgtgggttgttacctgaacaaccggtttctgataagaagccgtcttctctccatcagttgttccatcaatctcatatgtcagttttgtacttgcatcattatttgaatagaaacctgcttttcctgcacttgtggttcctgttccgtcatcacctgtatttggataggacttattagttgcataataccgatttgcttcatctgatggctttactctaaagcttacagtataagtagaaccatcttcaagtgaacgaccacctaacaaattaactgttacagttttaccactggtatttgcgatatagtctgttccaatagcaagtggtgtctcactgccggattttgttttcttagtcaccgtaattgttggtgtgctttctgcaaaatcgacatactcacttaatgtatccgtaatcgttacattcttataagtaggaatcgtcttgttcaaaatattagtcaatgctgtatcaagatttgttccatcaactaagtctgaattacttaacttatccgagaaggtcttcatgccatcttgtgtggctgatgtcagatatacggaatacagctttgcattagccaaggaacctgttacctgatcggctgcatcctgataatatgaattttcggtattagaaccatctccggtttccttccatttaccatttttttgaacatatgaatatgttggtttgccatccgacaggaaaataacgactttatcattaccactattggctttctgtgcaagcacatctcttgcctttaccattgcgtatgtccagtttgttccgccggttgcactaagtttattaacctttttcttaaaatcatccttgtcaggtgtttcataccaggaagttgattttgtaccatccttatcggagaatgatacaaatgctactaagttcttattgcccttactggcaaaaatcttatcaacaataccatcctgctttgttaacaactcttttacagttggaaggagattgtaataagtactaccccatgaataactcggtgctgtacccatacttccagatgtatcgataacaaataaaacatctacaccaggtgcactgcctcttgctcctgttacatccaaattcagtgtatagtcgcctgatgcttcattataggcgatgtacttcttatgagccggctcgccaagttctgcattggatgtattgtctgccgctaaaactgccgtatcggctgactgattcgttgctgtccttgcttttgctgctgctcttctctttgatgaagaacctgcaacagattcagttgttatgccgtttgtgttaaatgttttattgtaagctgagccattaccctgaatagccttaccgttatctgtgactgcttcatacacataagcgctgttattatcaccctctgtaatactataattaatcttaacctttgtgccattatccagtttataatataccggaactttccatgagcacttccagtcaacattcgcattcagtgtaactgttgcatttggtgtcaccttgccactcaaatcaagtgtttctgtacgtgtttctccatcctctgttaccagatatgtagcatgcaatgtaacattcaggctttccggtcttgtctgataattattatttgcatcatcccaaacctttgtaaaattgatatacttgaaattattttcttcatatcgatttgtgaaggaaataatcgctgttgtcttacctttcaattcaacaatctcagaaccatctgtgattgtcggagctgcatctccatctacctgtacactggtctgtgcacttgcattcagtgtatagtctttcagttctgcatttttctcggtaatcgtaactttatatctgtcatttataccaattttcttattattgattgtatataccagggtgccatccatttcctgcttcatatccgaaccagaaattgttgtgcgaccaaacaacgtctggacttcagcatccgttaacgctttatcgtccttagatgcgctgatctcgaaactaatctgatcctttactttttcaatgtctgcattacccaaaccatcaaaattctttctgatctgaagtgaaaattcatcgtccgctaccggtggcaatttctgtgaaaatcctacctgatcaaggaagttaccgactgtattattgtctgatgctgtttttcctgacataaagaagaatcgtgtcaagcttgaagttgctgtataaccattaatgccattgatatactgccatgcctgattactacttgttactcgcaataccataatgccgttttgattgtaaacctgctcacttctcgcagtactgtcagtggcaccgtattgaacccctagtccacttaaataaccttccagttttgtctgcgtagtcaaattattctcttgggctgtttttgtcggcataatgacaagaaacatcgtatcgtgctgagtcacattcgcattattacctcgtgcacgatgtgccagccaataattcaaagatgttccttcttttgtcaaaacatcctgatacaatgcaccggccgcttcacagtttaactcagcgaactgaccaccgtcataagctgccttcgtccaatcgtgaccgtctgagtaagtaccacgatcccaactatatgcacttgcaccgccagaaccattcgctttaacgatctcaatatccgctcctactttaccttctttgcccgttccggttgtctgccaaacacccttattttctttataatatgcatttgaccactggttattataataacctgttactgttggtgtctcaaagcttccgttctgtaactgattataataagttacctggaacggcgctgattcttgtgttgtaccattcgctaaagtcacttcgaccttataccattttcttgcaccttcatcataagccggatataactcttttccatcttcagaaaggttggttttaatttctgatgcctgataattaactttctttacttcagcataagtaccatctttctgatctgctctataccacttataagaagtaatcgttggtgctgtctgaccttcatctactttgtattcggcttttaatgcacctgaattgacaatatcatcggtgatctggataccggataacttctggtagacaagataaatagtctgtgtattatcaaacacattccatatatctgttgcctgtacagtattatacatccatcgataactataataataatatcccactttaacctgatacatttcgcttccatctttactgcctaaagttgcttttgaaaacgtatagccatcaattatcggtgcaatttcgcttaatgttgttgcagctgttatactcttattttcaatattattaccaatttttttcccttctgtatctacaacctttatgctgactgaagtcctaccccaagttaaagtaaatactgaaaagctgtcactgacaaattctgccttctgaacactctgctcatccgtggtcttaatattcgcttcttcattttcatctgcaaccatatctacaacattcctgacattgccatgtgcatcttcttccagatgcatcactgtaacattcagatcagcagtactgtcaatgtcttcactgttctcaaccgtctgaacaactttctctgcgatgaccggcttcttataatccattgtgactttgacatcaccatttggttcaaccttgttgccatctgcatcaaccagtgaaatatcgtaagcaaggaaaccggcgatatcataggcttccttctcagccttctctgtcagcttcttctctgcttcgtcatacttcttgttgattgcttcaacttcctgtttctgctcatctgtcatctcattggtgacttcctgtttcaccagtggaacaaccttcagagatgcatgatcaggaataatgccttcttcgctggcggttacgtgaaccttcacctgatcatcttcatattccaactgctgagcaacgacttctgtttctgtctcagtctcaacttctgtctctgttgtctcagccgcctgtgtctcagctgccgtctctgtataggcttctgttgccgcttcggtatgggcctctgtctgctgagtatctgctgcaggtgcttctgtctcctctgcaacggatgtctcttcctgaacttctgcctgagtctccggtgcctcataggaaaccgcttctgccgtcggctcttctgtataagtctgcactccgctctgaacttctgtctctgaatctgctgcagagatatctgcggaaacagaggttacactgccaagcatcaatgctacacacagcaacaaggctgtcaatcgtctatgcttcttattattaaacttactcaacatcatttcctccttccatttcctgctctttctcaacagcgtcatctatcagtttgatgagttccagtgcacttctgaagtactgttcacgctgtccttcaatccatgtcactttcccttgccatgttgcatgctcatgatccataatcttgaccagaaatgtatctgctttcttcgctcttcctttcatgacagtaccttcatcgtcctttctggattactccgttattgtagttttattatagcgaatcacccattacgccaaccattacaaaactacattttttgcagtttttttaattttcccttaatgcatttttccgacatatttcaattattgcttcattattcgacattgtgacgattatattttgtgtaatgttcggccgatccgtcatctcaaccattatatgcgggtgcatgacgtaatattcctgaaatcatcctaattctatctatcttttttacatccggaagattgccctatttccccttctgaacacaaaaaagaggcgcatcctttaatcgatccggatgtccgcctctttgtcgttttgtcatgtcgaagaagattgagtaaaccctctgcttatcaatgtctgttattacattcgttctgttggctttattactgtatcgcctgattaataatcttaaaaagttccaattcactgaagaatttccactcttgatcgccttctacccatttgaccacaccctgccaggttgaccgctgacgatactgcacgtacagcaacatcgtcccctttttgccgcgctccttctcaagctcttctgctgatttcttcttctcaggcggctgtaccgtcttccggctcttatctgtaaatgtccgcatctgtgttgatgcctgcggaaacttaatctggtcaaatagattctctgccagctcgatcagatgagccacatttgagaaaggacaggcttcttcgctgtagcaatgatacagacgccctgacaattcaccattccgaatctcatccacgcaaatactgatcagattgggagaacgctggaaattctgctgtcttactatttgtcccatgttttgccccatttccatttattctcattatcttcactattaaatccgctgtccgccacggatgataccgcatactccagatacttactccaggtcttatgctctcttgagaaatacttctggattctctcaaaaatcagactgcagttctctctgttggttcccaccaggagcagcaaatactgtgacttactgtaccgtgtataagaatcacctcttctcaggcaatgcgccaatgtgtcctgcagctccttgcccatcatatccagccgttcctcattcttcatcggctgccctttgccgttggtaatactgcagagcatcagataaacggactgaccgttgcgttctacgattctggccagtaaacggtatgtatcacggaaccccggaaggctgcagaaataagccccgctgcccttgtccgtctccttaagacgcttctccatctccggcagcgactgggtcttgaagttcatccgcccgttcatctgctcaaaaagcttcatcattcgttctgacggatacactcccaactcatccacaaacatcttggccgtattctcatactccttcagagcctcatcgtatttcttcatgcgcatgaggcagtcgatctgaatagcctgccactcatcgaagggatacattctgcaggccggttcacagacttcaatggctgtctcatattcgcctctgtccatcagtaattcgcacaatgtattcaatgcatttgtatatttctctttgtaattagaattcttcgccaggaccacaccgtcacagataaaatccggaagataatccccgccgtataactgacaggccttcttcagcagatcgatcttctcttcggcattctctgtctcatctgcctggtcgcacagtgacacaaacccgtctgcatccagcaccacctccatcggtgcagcaaaggaatacatgccgctcttgatctgtatataatcatactgaggaagccccgccgtcaccagcatcttcttcaggcgaaatgtagtcacgcgcagattattcgcagcatccgtgatatcttcattcccatacaacatatccaacaatcgttctctggaaacagtacgtccctcgctgcataccagaatctgcaaaagcttcactgcctttgtcgatttcccactgccaatcgaaatcgttttctctccatatctcatcgaaaagccgcctagggcctttacctccaacatcggcaaattgtctttcatacgcgccacactcctctaatctcttcatgcaatctataacgcacggtattccgccatctccgtatcagcttatcccctacattcataagaaaatgataacccttttctaaggtctttgtcaatatttgtacagctaaaatgcacctaaaaccgctcgactttctgactatttttgccgatttgcaacgtcgaattgtcgaactttgtcgaacattgatatttgttcttgtctccttggtgatttaaaataaaaacagtcaacgttgatctgatgaacattgtgtattttttattgcttacagctactctcttgagtataataaaaggggaatcgacgatatatgaacacagccattacaaatagaatcactgccgccaacgataaggcgcagtatgacgaatacgccaagcagctgatcgcacagaagctgatacttgcctatatactggtacagacgattgatgaatttaaaggcatgcagccggaagacgttgtctcccgcatcgaaggggaaccattgatcggtattgttccggttgaacccggtatgacaaataccagctacacccattcatccggagaccagctcattggcctcaacactgagaacagcgagatcaatgaaggtatgatccgctttgacatcatcttttacgtccgcatgaaggatggccttgcacaggttatcatcaacatcgaaattcagaaagacgagcccacccagtactttcttctgaacagggcgatcttctatgtcagccgcatggtctcctcacaaaaagggagagatttcgtccatcagaattacaatgatatgaagcgtgtattcagtatctggctctgtctgaacatggatagccacagcatgtgccatatccatctgaccagggatgatctcatcaatcatcataactggaaaggaaatctggatttactaaatattatctttctgggcatcggtgaagaactgccgccacaggaagagcaataccagctacatcgcttgattgctgcacttttatccaaccaattacctgcagcagaaaagcttaaaatcatccataacgaatatcatatcccattatcacaacctttaacggaaggagtcaacatgatgtgtaatttaggtgaaggcattgaagaaagaacagccgcaagagttactaaagaagttactaaagaactaaacgccaaacacgccaagcatgccaaagaacttacagaaaaacttgccgagaaagaccgtatcatctcagcttaccaattattagcaaggcatacaccaatcgcacagattgccgctgaaaccggacttactgaagaagccatccgcgcactctaaagcacacttaaccctaatacaaatccctgccaactcagtctttggactgctttggcagggatttaatagttgaatttttatttcacaaatacttttttcaagtgccagatatctcttacatactcttcaatggttctgtcagaggagaacttgccggagcatgccgtattgagaatggccattctgttccaggccttgctgtctctgtaagcttcattgatcttcgcacgtgcctcggcataagatctgaagtctttcagaatgaagtaaacatcctggttgatcagagaattgaacagttcacggaaagtctctgtatcgccattggaatatgtgccgtccaccatctgatccatgactctgtggatatctgcatcctgctcatagatctctctcggattataaccgccgttggcttcatagcccataacttcatcggagctcataccgaagataaaggcattctcgctgccgacttcttcaacgatctccacgttggcgccgtccattgtacccagtgtaatggcaccgttcagcatgaatttcatgttgcctgtaccggaagcttccttgctggctgttgaaatctgctctgaaacgttgctggctgcaaagatgatctctgcattggacacacagtagttctcaatgaagacaactttcatcttgtcattgacagccggatcattgttgatcacatccgcaacagcattgatcagtttgatagtctgtttggctgtcttatagccggctgcagccttggcaccgaagataaatgttgtcggatagaacttcatatccggattgtctttcagctgattgtacagatacataatgtgcataatattcatcagctgacgtttatattcatgcagacgcttgacctgtacatcaaaaatggaatccggattgatatcgataccattatgctctttgatatatttggccagacgcagcttattctgatacttgatctcctggaattccttgcgggctctggaatcatccgccagcggagccagacctttcagcaatggcaaattcgtgatccattcgtctgtaccaagcttatctgttacccactgtgccagcagcggattcgcatgaagcaggaaacgtctctgagtgataccgtttgtcttgttgttgaacttctcaggcatcatctcgtagaaatcatgcagttctctttcttccagaatctgtgtatgcagtctggctacaccattgacagagaagcctgcaatgatcgccatattcgccatacgcacctgaccttcatagagaatcgccatattgcggatcttatcatactggttcggatacttctcttcaacctggatcaggaaacgacggttaatctcttccacgatctgataaactctcggcagcagacgcataaacaggtcaaccggccatttttcaagggcttcagccatgatggtgtggttcgtataagcacagcatcttgatgtgatatcccatgcatcatcccattccagattctcctcatcgatcaaaatacgcatcaattcaggcacagtaaccgtcggatgggtatcattcagctggaaaacaaccttatccggcagctgatggatgtcatcatgtgttgccttaaacttcttgatcacctgctgcaggctggctgatacgaagaaatactgctgtttcagacgcagttccttaccactgtaatgattatcattcgggtaaaggacttcaacaatactcttggccagattctcctgctcaaccgctttctgataatcacccttgtcaaaggaatccagattgaactgtaccagcggctctgcatcccagattctcaaggaattgacaataccgttgttgtatcccacaaccggcagatcataaggcacagccatgacagactgatagccgtcctgaatatacacattgcgcccaagtttctcattgtattcaattctaacataaccgccgaatttgatctcctgagaatattccggacgcttaatctcaaatggattgccgttcttgagccagtcatccgggatctctacctgctcaccgttcacgatctgctgtttgaacataccgtatttataacgaatagtacagccgtaagccggataattcaatgtggacagggattcaataaagcaggccgccagacgaccaaggccgccattgccaagagccgcatccggctcctggtcttccacgacattgatatccagtcccatctcctgcaggacttctgccacttccttataacagcagagattgatcagattgttgcccagggcacggcccatcaggaactccatagacagataataaacggtcttggcatcctgtttctcgtattccttgtgggcattcagccactcatcaatgatcatatcctttgatgcataagccaccgcctggaaaatctcctgctggctggctgtttcaggtgtctttctgaacagatacttgatattgttcagaatttccttcttaaatgcttctttatcaaatggttcgaatactctcttttcaccaactgctgctatatcactcattcaggcattctccttttctacaccaatcacaacggtttcgccgttgatattccattctttattataccccttgattgtatcaaagcagatttcatttgccaatacttcatctttgatttcggcattgttgctgtcaaccagagttttgatcttatcattttgagcaaaataaacacgaatatgatccattacttcgaatccggcttctttacgcatggtctggatcttggaaataatctcacggacaaagccttcttctaccagttccggtgtcagattggtatcaaggacaacggttgtctcgtactctgtatcggaaacataacccggcatctgtgcggcatcgatcagcagatcttcttcaagcagttcgacctgatcaccatctgcatcaaatgtcagtttgcctgttgtcttcagttcgttcatggctgcgttgccgtcaacactgccaagatactgtctgatagcattcagtttcttgccgtatttcggaccaactgtacgcagctgcggtttaaagctgtaagatgtaaatgcgctgacgtcatctgtgaagacaacttctttgacatttaattcatctgcaataatgtctttgtagaaatcagacagttcaaatgcagccttgacatacatcttgccgatcggctgtctgttcttgatgttggctgtatttctgcaggcacggccctgtacaacgatctggagaacatgatccatgtcttcttcaagctttgtatcgatccattcttcattcacttcagggaagtcacagaaatggatactttccggcgcattcttatctacattcacaacgatgtttctgtagatttcttctgtcatgaatgggatcatcggtgcagcagccttacagattgtaacaagtgctgtgtaaagtgtcatgtaagcattgatcttatcctgctccatgccctttgcccagaatctttcacggcttcttctgacataccagttgctcatatcatccacaaattcctgcaggactttggctgtttcagggatcttgtaagcagccaggttggcgtcaacggccttcactgtagaattcagtttggacaaaagccatttatccataacagataatttgccgtaatccagtgtatatttcatcggatcaaactggtcgatctcagcatacagtacatagaatgcatacgtattatacagtgttcccataaacttgctgcggccttcaagaacggctttcttgtggaaacggttcggcagccatggtgcggagttggagtagaaataccagcggatcgcatctgcgccgtattctctcaaagcttccatcggatcaaccgcattgcccttggatttactcatcttctgaccgttttcatcctgtacatgccccagaacgataacatttctgaatggagactggttgaacagcagtgtggagatcgccatcagagaatagaaccatcctcttgtctggtcaacggcctctgaaataaagtctgcaggatactgttctttgaacagtttctcattctcaaatggataatgatgctgtgcaaatggcatagaaccggagtcaaaccagcagtcgataacctccggtacacgatgcatttccttgccgcattccggacacttgatggtaacagcgtcaatgaatggacggtgcagttcgatatcatccgggcagttgtcggacatactcttcaattctgcaatgctgccgatggcatgctggcatccgcattcacattcccatacatttaatggtgtgccccagtaacggttacggctgataccccagtcctggatattctcaagccagttgccgaaacggcctttaccgatgctctcagggatccagttgactgtgttgttgttgcggatcaggtcatccttgacagctgtcatcttgatgaaccaggattcgcgtgcatagtagatcagcggtgtatcacatctccagcagtgtggatagctatgctcaaagttcggtgcagagaacaggagtcctctctccttcaggtctttgataacttcaggagatacgccgttttcaccttccagatctactctcttgatacaggaatgaccggcccactttgtttcctttgtcatcataccgttttcatctaccatctgtaaaaatggcaggtcgtattttctgccgaccttgctgtcgtcttcaccaaatgcaggtgcgatatgaacaacacctgtaccatctgtcatggtaacgtagctgtcgcagacaacatagtaagctttcttctttgtctcaacaggataaagggcttcgtattctttatattcaaggtctgtacctttatatgtctccagaacgtcgtatgtgccttcgccaagaactgtatcagccagtgcctgtgccagatagtacacataatcttcctctttcatcttaactttgatgtaagtctcatcaggattaacacaaagtgcaacgttggaaggcagtgtccaaggtgttgttgtccatgcgaggatataagcgtcttcgccttttaccttgaaacgtgcaatggcagatctttctttgacatctttataaccctgtgcaacttcatggcttgaaagcggtgttccgcagcgagggcagtaaggaacgatcttgtaacctttgtaaaggagcttcttgtcccagatctgcttcagtgcccaccattcggattcgatatagttgttgtcgtacgtaacatacggatgctccatatctgcccagaaaccaacggcatcggagaattcttcccacatgcctttgtatttccagacgctgtccttacaatgctggataaacggttccataccgtaagcttcgatctgatccttgccgtccagaccaagcatcttctcaacttccagctcaaccggcagaccgtgtgtatcccagccggctttacgcggcaccttatagcccttcattgtcttgtatcttgggatcatatctttgataacacgggtcagcacatggccgatatgcggcttgccattggctgttggcggtccatcatagaaagtaaattcaggactgtgctgtctcagttcaatactcttttcaaaaatcatgttgtcggcccagaatttctcgattttctgctctctctcaacaaaattctgattggcacttactttgtcatacatcttgtttcctccttatataaaaagcaaagtagatttctatgttttaaatggaatgtgccctggcacattcatgcgcccggcgcagttgttcaacaaaaaaagctcccactccgaataggaatgaaagcttgtattcattaaaccacctatacgacatactgacatatgcgttccctgtaacggaggaaaatccggcacagcttacccggcatccggcatctcttctgacctgtatctcgtaaccctgctcagtgtcagaatatgtcggcctgtcagcctgcaactcaggagtgatcttcacatccatgctactcgtatcggctcacacctgccgccgactctctgaaactttcatacggagctactgtctctgtcttcgtctttatccactatgtaatcatagtacaaagactttggtctgtcaacctttaaaatcaaaaatcccctgttttgtatacagaggattcctgtcttttctttatacggataatgaggccaagctcatgctcatgcctgtatgcagccttgctgaatatctgttataaatcaacaggattccgcacggtcggctgccggcgtttcctgtttgcccatagctttcatcactgttctgaaaatcagtcgtccaagaggaccggcaccaaaaatctgccagcaaagtgccatcgggaaattcatcactgttgtctggaaccataccgcaataaagttgctgcctgcgttcttaaaaagtaatgttgcaataaaactcatcatcgggcacatcagacaaacgatcatagatgagatcgccagtgtaatgaaaatcggcttatcctgaggtgacacaattctaaaagctaacatagttgacagcttctcaacaacaaagaattccagaatgatagctgcaggccacataatcttcatttcgccaaatgccatcaggaatacctgattcgtcatgccaccgatattcaatgaaatattatagcagatcatggcatagaccatcaaaaaggccatcagaattgtaaaaaaaacattttgtaattttgtctttggcataaaacacactccttttcattagaaaagaacataatgtgtgttgttcgttaatcagtttcatgcctttggactcactctcaaatcccggcatcacctgtacgtttccaatttcttaccaaatacattccttatttttaattcatttactatttacagcgtcaatcattctatcacagttttcttcccttcgtaagtgtttttttcatcataaaaccattttctgtataatttctatttgtattcctccattgcccatcctttctgtgcatctttactaaattctgcccatatgggaaaatacccaaaaatttttctgtattttgttcataaaatgacttgtaaatttttgtcggaatattataatagctatggggaattaatccccattttatttcattatgtttattcattgaggagatcggaattaatatgtatagaggagacgacattcttaaaatttacgaccaggatctgaacaacattggacgtgccacccgcgaggaagtacatactcaaggcctgcttcatcaggttgcccatgtatggatgttccagccaaaggaagatgatacttatatcttgattcaaaagcgttcacttgaccgcgaactatatcccggcaaatacgacctgatccagacaacacattttgatcctgatgaaagctatgaagaagccatcgtcgacagtctggaatactaccgcggactgaaggaatccaaagaagacattatccatgtgggcagcacccatcagcagattgacgccggcgactaccatgacaatgcccttgttcaggtcttcgccatcttcacagccaaggcacttttcatcatgccggatacagaagaaatcgtcaaagtccgtttcgaagacttccgccagctcatccacggcaagcagaacaccatcaaactttactcactggatgatgtttatctcaaagagagcagcgccgatgaatggtggctgaggaaagacgaatttatagacgtcgtagaaccatatattgacagccgaattgaagagctgtaaaagtctttcgttgattttgataatcggacggcaggaatagaaaataaaacatccatgaaacaacgcgcacccgcacgaaacgtttcatggatgttttattttctattgcctgtctgtgtattggccagaactataaaaccaaaaaatttttaggttcagtccaatgacttctctaacgctgatcatgaataaaactccctgaaaacgtttcgtgcgggtgcacgttgttttcagggagttttattcatgatcagcgtttcaagttacttgaactgagccgtcattttattctgtatttgccctttccatgccccttcacaggctcgataagttccaattgatgcatgatctcaattgtacttccggctctataatctccatagtgtaatgcactttttatttctttgcgcccaaatatctgatcaaaggcaaatgtttcaagaacctctttgacattcccggcaatcgtagacgaaatccttttgtcttctaccgcatttatgactatttccaatagctgtgctttctgctcagacattgatttttcattcgcgaaaccatcattgttcgcttcaaacagtgattgttcttttagcaaaccgtggttttcttcttcaaacagtggtttttctctcaccaaaccgtggttttctgcctcaaacacagcttttccttctgacgctaaacgattacgaatggttgcctgcagcataaatgcattcactctgtactcagggctctgtaacccgaccgcttccaattccctgcacatccgatctacaccttcaccatattccttgacaaaattgtagtctctcaaaaattctgctatcttcggatttcttgaaaaatgagtatgccggatatttccagccttaacaagacccggtaatctgccagggctctccacaacgatcctgtcgtcaaacattttaatctgaatatctgttccacgaatactgtaatcacgatgtgtaatagcattaacaatgatctcctgacgaacaaacttcgggtattcttcttctgtcacaaacaatccgtctgctccaagataggttttctccttaatctgcgtatccaaataggagatggccttcgtcagcatatttaaaatattcccctcaaaaataacatctttaataacattcatctgagcgcccacacattcccgaattccctcataacgaataaatcgtacgcgcgctcttgggaaatataactgtggattcttgccaaacaacaaaatagctgctgtgcttacctggaacgaatgattcttctctttcgcagcaatatattatatagtacattttaccatatccattttcatctgcccatagcttcaagcccacaatatttcgactatcttcgacacccgtgcagccaccaaacaggttcagctcaaatatattctttaacgcctgttatgaaaaatcccccctgaaaacatttcgtgcgggtgcacgctgttttcagggagttcctttttatacaaaaagttacagtataattttctttatactataaaaagggcactgtcctgttactttctttctgaaacatttgacacgctttattgtgtctgtttcagaaagaaagtacatcaggacaatgcccttcatagtacagaataattatactgtaactttacattttattctgtgatatctgcatacatgaagtaccagaaaccgttagctgaatgccaagatcctgtgatcttgctgctctgcagccagaaatcgttgtagtaagcgattggaatacaacctgcatcattcatcagagcgtcttctgctttgtgaagatctgctgaacgtgtagctgcatctgttgtaactctggaatcttcgatagctgcatcgaagtctgcattagtgtatttaccatcgttgttgccgtttgttgtgcagaacagttcaaggatgttggatggatctgtgtagtcacctacccaaccgttacgagcaacatcgaattcgccgttacgacgcattggtgtgaagcttgcccattcaacgatgttgaccttaaggtcgataccaattgcagcccaagcctgctgtaagtactcagctacaaccttgtggtaacctgcatcatttgttgtgtactcgatctgtgggaaaccttcgccgtttggatagccagcttcttccagtaacttcttagcttcttcaaggttagcatcgaagttatcattgtcaatgtaaggtgtgccgccatttgcattttcagcaaatgaagaaccatctgtatctaaccagccaggacctacgattgagcttgcaggtgaatatgtaccctgcatcagagtattcgctacgtagttacgatcgattgcaaggcttaatgccttacgtactcttgcatcctggaaatattctttctgaaggttcaggctgacatagtatgtaccgataataggttctacatggaaatcatcattgccctgaaggctagggatttcttctgtaggtacgtctttgatcatatcaacttcgccacttgtgtatgcactgtaagctgcgttggagtcttcaatcagttcaaactcaagcttgtcaagtttgatggcctcagcattccagtagttaggattcttgctgaatgtgatgtgtgatccaggtacccattctgtcatcatgaaaggaccattggagatataagtatccgcagatgttgcccaagcatcaccatttgcttcaactgttgcctgctgaacaggattcaatgttgcgaatgctgcaagttcgccgaaatatgagcaaggatgtgcaagatttacaacaactgtcttctcatcaggagcctgtacatcaagtttagtgatatcgcctgctactgcttcatcatagcctttaaccataccaagaactgtctcagcatatggagctgctacattaggatcacatacacgctgccagctgtaaacaaagtctttagctgtcagatctgtgccgtctgaccatttaaggccatctcttaagtggaatgtccatgtaagaccatcttctgatgtctcccaggattctgcctgtccttcctttaactggccattctcatcaagagtcagaagaccttcaaatgcatgaagaatcatgttaccgccatctacagcactattcagtgcagggtcaacagtttctgggtcaggaccaacctgaactttcaggattttctcgccggtagtgctgccagcttctgtggattctgctgttgtctggttgttgtcgcttgctgctgttgtttcttttgcagcggagctgccgcagcctgccagaccagctaccatagcagctgtcagcagaagaggtaagattctctttttcatgttctcttctccttttcttttttgcagatgctcagaaccaaccgcttggaccatggctccgaacaatttgcgttttctataaacattatgcattccgcataactgcttatcaggacttataatattatagtaactgttcagagctaacctccaaaatgctacgcatttcgtcggtgtggcgtatccgccaaataaaatttcaaaaacagtcttaaaaatgcaagcattttatacctgttttttgaaattttgcttagctctgaacaattacacattatacccttcacagcgctgtctgtgaaacggtacttttagttgcacttgtccagatgatgacaagctgcataatgtcccggagccacttccttgaattccggaacttccttcgcacactgctcgtctgcatatgggcagcgtgttctgaaacggcatcctgaaggtggattcagcgggctaggtacatcgccttcaagagcgatacgcttgctggcccttgcctgcttcgggtctgcgatcgggatcgcagagatcagactctttgtgtatggatgcaggctgtgcattgtcagctcatagctgtcagcaagttcaaccattctgccaaggtacataacaccaatacggttggaaatatgcttaacaacagacagatcatgagcaatgaacagataagtcagattcatgctctcctgcagatcctcaaacatattgataacctgcgcctgaatagaaacatctagcgcagaaatcggctcatcacacacaatgaattccggatgaacagccaatgctcttgcaatgccgacacgctgacgctgaccgcctgagaactcatgcggataacgattcgcatgctcggagttcagaccaacgcgacgaagcatctcgataatcatatcataacgctcctgcttggaagatgcaagatggtggatatcaattggttcaccgacaatatcaccgactgtcatacgcgggtccagactggcgtatggatcctggaatacaatctgcattttcttacgataaggcagcatattctctgcaatcttcttctctttatcaaaaataaccttatcatcataaataattctgccgcccgtcggttcataaagacggagcagtgtacgtcctgttgttgtcttaccgcatccggactcaccaacaagaccaagtgtttcacctctgttgataaagaaggaaacatcatctacagcctgaacatatttcttgttctttccaaaaccaccggccggaaagtactgctgcaaatgttctacctgaactaatttatcactcattttgcggcctctctttccatctgttccttctggttcatccagcactgtgtataatgtacatcatcgaaagttgtcaccggtgccatctctctcaggcagatcttcatacagtttgaacaacgcggtgcaaacggacatcctgcaggcggattcagcaaatcgatcggtgtaccttcgattggcaccagacgctcatgctctttggcatccagtcgcggaatactcttcaaaaggccctttgtatattcatgcttcggattgtagaaaatatcatccgttgtaccgtattcgacaatacgtccggcatacataacagcaatcttgtcgcacatgctggcaacaacaccaaggtcatgggtgatcatgatgatcgccataccaagcttctctttcagctccatcatcaactcaaggatctgtgcctgaatcgtcacatcaagggctgttgtcggctcatcggcaatcagaagcttcggttcacatgccaatgcgatcgcaatcataacacgctgtctcataccgccggataactcatgcggatactgcttcagacgcttttcaggctcattgataccaaccagttccagaagttctttggctctggcccgggcctgctctttattcttgtctgtatgcagaagaataacttccatgatctggttgccaattgtataaacaggattcaaacttgtcatcggatcctggaaaataatcgatacttcgttgcctcggatcttacggaactccttctcagacagatcgttgatacggtgaccgttaaaatcaatcgtaccaccgactaacttacccgggtaagcagtcagtcccatcagactgtatgcagtaacggatttacctgaaccactctctcctacaataccgaggacttcaccatcattcagatggatagaaacgtcattcaatgccttaacttcaccggcaggtgtgaagaatgaaagacgttcgtgctgtatatctacaagatattctgacataatcttacactctccttcctagttcttaagtttagggtcaaaggcatctctgaggccatcgcccagtaagttaaagctcagaataatcaaactgataactgctgccggaataaacagcagatacggatatgtattcaaaccattgatcgcatcactggcaagacttcccagagaaggcatcggaacagcaacaccaagaccgaggaagctcaggaaactctccgtaaagatagatgacggaatctgcagtgttgttgtaacgatcagtgtaccgatacagtttgtcagcagatgcttcttgataattctcgctgaagatgcacccagtgctcttgcagctgtaacatattcactttccttcagcatcaggatctggcttcgtaccatacgtgccataccaacccagtacaaaagagcgaatacgatgaaaatactgatcaggttctcaccaacaacggaaatccatccgaagcccggcgcctgagccaacaccttcaatggtgccttcaaagcgaaggacaaaagaacgatcagcaggacatccggaatggtataaataatatcaacaatacgcatcatgatcagatcgacccagccgcctgcaaaagcagcgatggaaccgaaaatagaaccgatgacaagaatgatcgctgctgcaatgataccaaccagcagggagatacggcttcccatcatgacacggatcgcataatcacggcccatcttatctgtgccgaagaaatgcggaaataccttctcgccggctgctatttgctccatctctttggcagaatactgcatcggtgcaaggttattcgcaccctgaatctgctgttcgtaactgtatggataaaatgccggaacaataaaggcaaaaatcataacaataataatgataaacagacaaaccatagccactttgttcttacgcagacgtctgaaaccatctttccagaagctgacgctgtcacgcatgacaacaaggctttccttctcttcatcagtagccggaaggaagtcgtctggatttaactttaattgaaaacttaacggattcttctccattatcacttaccctcctgtttatttcaacttgatacgcgggtctaccagtttgtagacaatgtcaacaataacattcataacgatcatgatcgtcgcaaggaaaattgttgtacccatgatcatcgtgtaatcacggccattgatggctttgatgaattcgccgccaagacccggaattgtaaaaatcttctctgtaacaaaactacctgtcagtgtataagccagcataggacctacatatgtaataacaggcaggatcgcattacgaagggcatgcttaaacagggaaaccttctgtgacaacccctttgccttcgctgtacgcatataatcctggccgagaacatccagcatggatgaacgcatcagacgcatgatatatgatgtcggataagctgccagcgcaaccaccggcataatgtagctctgcgcactcttaaggcccagtgtcggcagccactgcagtttaacgccaaagacgtaaaggagcagcgtacagataacgaacccgggcaccgcaatgccgcaggtggcaatgacactgaataaactatcaataaaagtgcctctcttgtatgcagccagaacacccagcggcacaccgacacaaagtgcaaggacgacagccattccgcctaatctagcggatacagggaactttgtcgcaataatatccataactgtacggcctctctgcttcaggctgtcaccgaagtcgccgtgagctgcatcggaaatataagtaaaataacgttctgccataggtttatccagtccatacttagcttccagcgcttttgttgctgcagggctgattgccttctctgataagaacggtccgcccggaaccaggttcatcagaaagaatgtgatcgtggcaactgcccaaatggtcacgattgcaagtgcaattctcttgagtatgtatttacccacttttctctctcctattcaatttagttttctgctattataacgtctaagacggacatttgtctatgtacaaaaaataccatttgtatagtatacttcatcacgttaatagactaaataacaacagtcatatgaaataatttaaattatagcatatattgtttgaattgtacagtaaaaaaaacacttcgcagctttaacaaagcaactccgcgaagtgttttctgaatatttattcattttttaatgttttttgacatttttgctaatatttattggaaatatttgtcattctattcatttatcgaaccatatccggtgtaatctcatgcagactgaaggcaccacacatagccatcgtatctgccagttctccggccagtttgtcaatgtaggctttcacgccttcttcggcaccgccataaacagctgttacaaaaggacgggcgataataactgcatctgcaccaagtgccagtgccttgaaaatatccacaccgcttcgaatgccgccatccacaaaaatcttcatgctgccgccgacagccttcacgatttcaggaagaacttctgctgttgccgggcactgatcctgtacacgtccgccgtgattggatacaacaatggctgctgctcccgcttccttcgccttcaatgcacccttcactgtcataacgcccttcacgataaacggcgcaccggccatttctgcaatggccttcagatcctcgacggatttgccgcctgccggcggatccatattcttcaggaacggcagaccggctgcatccacatccatagccactgcaaaagcaccggacttcttcacaagatccatcttctcacgaatcgtatccagattccacggcttcactgttggaacacccatgccgtcggccaatgcgatcgcatctgttgccgcttccatcaccttcggattcgtaccgtcacctgtaaaagcaacaatgccattttctgcacaggcagaaacaaggactttattataagaaacatcatcatatgcatcgctgtaatgcaggttcacagcccctacaggtcccgcaaaaaacggatacttgaacttctttccaaagagttcaagggatgtatccactgtcttcggcgcacacaatgtatccatattcactctgatctcctgccacttctggtaattgcgaatggccgtatcgccgacacccttggctccgggacccggaacggtgttgcggcatgccagaccattgcagaccggacaggccttacataacttgccgatgttctctcttgcattcgcaagtacttcattataattcataatctcctcctcactccaacgtcatcctttctactacccccggatcatgtcggtctttattttaaatataatcgcagtgcctgaaaccatacgctcaggctcgcttaccccctacaaactaagtataacaccaattacaccagatgcaagaatataaatgatcggatgcttgcctgttttcttataaacaacatacagcaccacgccaaatataaacgcttttatattgaagagatccgtcagcgatcctgtttctgcaaacagctgtgatctcagaaacgcggcctcagccacacgaagtcctgccacagaaatcagacccacggatgcggctctcaggccatacatacaatattgtacgtatttattcgttttaaatttctccagaatattagacacaataataatgataataatagacggtgttaccagtccggccaccgcagcaataccgcctaaaacacccatggaagtaaaacctgtataagtagccatattgatgcccatcggtcccggtgtggattccgaaatagcgatcatattggaaatatcatccagcgtaaaccagcctgtcgcagcctgcatatcataaaggaacggcagtgttgccagaccgccgccaatggcaaaaagtcctgtcttaaaaaattcccagaaaagtctaaatatcaacatatttcatccctcctatgctttcttctgcgcttttgaacgttccatcaaagtcttgatgatcacacctgctgctccggcacatacaatccatacaaaagatgcagcatcggtaaacagtgacagaaccacaacggccgcaaaaatcagatacgtcgccgcatcgatcagcgacttcttcgccagtttgataacggcatcaagcaccaggacacacacacagacacgaatacctgcaagggcatgctgtacccagacaatatgtgtaaaactgttaatgaatgcggcgatgatcatgataatgaccagtgaaggaaaaacacatccgatagtcgctacaataccgccgataatacctttgcgcttatacccgataaatgtcgaggtattaacagcaataatacccggtgtacactgaccgatggcataataatccatcaattcctcactcgttgcccagtttctgttctccacaacttcacgctgcagaatcggcagcatcgcatagccgccgccgaaagtaaatccgccaatcttggcaaacacaataaataattcccataactctttcataatctctataatctcctttctcttcccatccgaatccctttctgtcaggattcgctttatttatcgttgtgaaaatacacctcctggtttataatgattcttaaagcaatgttttcctgtccaccatttcattacggccgatgatgcctccgttccggacggcatacattatgatagagaggtttccatgacacttatacagctgaaatatttccagacgatctgcaaatacaacaatatcacacgggcatctgccgaactccatgtctcccagcccagtctctccaatgcggtcaaggaactggagcgtgaattcggtgtcagtctgttcaccaggcgcagccgcggtctggaactgactccggagggtcgctacttcctggatgaggcagataagcttctggaacaggccgagcagctgacaaccaatatgaagcatatgtctacaaccgacagaacactgacccttggtcttccggccatgagcggttccctcgtcttcacagatctccttcgaaccctctatgcccgttctcccggtacacatatccaggtcatggagaatggttctctggccaatcgttccaaaatcatggatcacactctggatgcggccattatcacccgaaacggaccgctccctccgggcatcgggcatgtgacgctgcgtcatgtcaacatctgcctgtatctgtccgtcatgcatcccctggctgagaaagataccgtaacaaccgacgacctggatcaactgcctctggccatgctgccggaagatactttcctcgaccactgcatcgatcagtattatgaaacccttcatctgaagccgagtatcattgtccgcaccaatcagctggcaactatccagcaattggtggcaaccaacacaaccgcggcttttcttctggatcatgtactggaagaaagcagcgatatcgtgaaacggacggtaccgggccttttgcctgcggagatcgacctgatctggaaatccagccgccatctctcaccgcatctgaagaatctgatcacagccgcccggaacatctgacgaaccgaactgtacaatccaaaaaatctgttgcctgaatggccgatatctgacagatctgatacagttagggtttctcaacactctatccatattgtaagctatatggaacaattattccaatactgatgttttatcgtggtatagttttattctataccactttttctattttcctttgtaaacgtttccaaaacgaattctattttgtcgaatattgcatttttttcggagcaattatgaatttttcttgatatcccatcacatttttgaatgtttaatatttaacgcttgcatttagtcaaaccatatcgtatagtaaaaatatatgtatgcaatacactccgtacgacagtctgcattcctgctactgtttgtacgatagaaaataaggggatttcagattgtatttgcaaagttaaaaaaggaggtttctcaaaagtgggagaagtacaaatcaaaccattcaaacgtgttctcgtcgctaaccgaggcgaaatcgccatccgtgtttatcgtgctctgaatgagctgggtattacaaccgtcggtatttattccaaggaagaccgctatgccctcttccgttccaaagcagacgaatcctatcagctgaaagaaaataaaggtcctgttgatgcttatctggacatcaagggcattattgaaattgccaagaaggcaaatgttgatgctatccatccgggctatggttttctctctgagaatccggactttgtcgaggcctgcgcaaaagccggcatcgtatttatcggaccttccgaggacatcatgaatgccatgggtgataagatttcttccaaacagatggctatcaaagccggtgttccaatcatccctggtgtagatcacgcattgaagacagaagaagaagtcatgaaagttgctgagatggtcggttatccggttatgctgaaagcctccaacggcggcggtggccgcggtatgcgtatcgtcaacagcgccgaagatatgccgaaggaataccgcgaagcctgcaatgaatccaagaaggctttcggtgatgaccagatcttcatcgagaaatacatccgcggaccaaagcatatcgaagtacaggtgcttgcagataattacggtaacgttgttcacctttacgatcgtgactgctccgtgcagcgtcgtcatcagaaagttgtcgaatatgcccctgcattcagcattcctgaatcaacacgtcagattattttcgacagcgctatcaagctttgcaagcaggtcggctacagaaatgccggtacacttgaattccttgtggaccaggaaggcaatccatacttcattgagatgaaccctcgtgtccaggttgaacataccgtttccgagatggttacaggcatcgatattgttgcttctcagattctcattgccgaaggttatccgctgaacagccctgagatcaatattccatcccaggatgctgtcaagtgtcagggattctcgatccagacacgtgttacaacagaggatccatccaataacttccttccggacacaggcaagatcactgtttatcgttccggttcaggcaatggtatccgtcttgacggcggcaacgcctatgcaggcgctgagattcttccatattatgatagtcttcttgtaaaagtgatcacacacgaccgtacatttgacggtgccatccgcaagtctctccgcgcattgaaggaactgcgtatcagaggtgtcaagaccaacgtgcctttcctgatcaatgtcatcaaccatgagacattcagagccggccagtgctacaccacttttatagaagaaacaccttctctgttccagctgcagcgcagccaggaccgtgcaaccaagatcatcgaattcctgggtgacagaatcgtcaatacaaccggcggcgacaaaccattttatgaaaatcgtgaaattcctcagttcgatgaggagaaaacggtttatggtgccagagacgaattcttaaagcttggagccagggactttactcagaagatcttgaatgacaagaaattatacgtgacagatacaactatgcgtgatgcccagcagtccctgatggcaacccgtatgcgtacgaaggatctcgccggtgcagcccgtgcaaccaatgcatttatgcagaatgcttattccgttgaatgctggggcggtgccacattcgataccgcttatcgtttcctgaaggaatctccatggaagcgtctcgaaattctccgtgagagaatgccgaacactatgctccagatgctgctgcgtgcatccaacgccgttggttacagcaattatccggataatgtggttaagaactttattgatgtttcctccaaagccggcatcgatattttcagaattttcgactccctgaactgggttgagaatatgaagatgccaatcgaagaagcattgaaaacaggcaagattgtcgaaggtacactctgctatacaggcgatgttacgaatccaaacgagaagaaatacacattggattattatgtcaagaaagccaaagaactcgaagcacttggtatccataccttctgcatcaaggatatggccggacttctgaagccatacgctgccaaagagctgatcggtgcactgaagtccgaactgaagattccggttcaccttcatacacatgattctacaggcaacggtgttgcaactgtcctgatggctgcagaagccggcgttgatatcgtcgatctggccattgaatccatgagcacactgaccagtcagccatccatgaactctgttgttgctgccctgcagggtacagaccgtgacacaggccttgatcttgatgaactcagtgaacttggccgctactatggcagagtccgcaaggtttacaaacagtttgaaagcggtatgaacgcaccaaacgttgatatttacaagtacgagatccctggcggtcagtactccaaccttctcgcccaggttgaaagcatgggtatgaagaatcagtttgaagaaatcaaagagctgtacagacaggccaacgatcttctcggcaatgttacaaaagttacacctacatccaaggttgtcggtgatatggctatctttatgctgaagaacggtctgaacaaagacaatatctttgaacttggccaggatctctcattccctgcctctgttgtagactacttcaagggcatgatcggacagcctgaaggtggattcaatcctgaacttcagaagatgatcctcaaaggtgagaaaccgatcactgtccgtccgggtacattgcttccggatgtcgattttgacgctgttaaggccatgctgaaggataaatacgatctctcagatttctccgattaccagctggatctgaaggctgtcagctatgccctctatccaaaggtatatgaagattactgcgaacatttccaggcatacaacgatgttacacgacttgaaagccatgtttacttctatggcctgcgccgcggtgaggaaacaacccttaagattggtgaaggtaaagatctgctgatcaagtttatggaaatgtctgcacctgatgaggaaggcaaacgtgtcctcagctttgaaatcaacggttctgtccgtgaagtcactgttcaggataagaagcttgaagttaagtccgataagaaactgaaagccgataagtccaacccggctcatgttggttctacgattccgggtacagtcagccaggtattcgtcaaagaaggcgaagaagtgaaacagaaccagccgctgctcgtactcgaagccatgaagctggagacaactgtcgttgccaaacaggacggtgttatcgacaagatttacgttgctgcaggcgatcgcgtcaataccggcgatctgctgctgtccttccagaaataataccttatataaacaaaaagcgcagtccatgctttatgcctggctgcgttttttgtttatattgtgccccgtgtttcattttatagtctctgtcgctatgctcatagttgcaatactgaattttacgcataaaaaatagccgtcctatgtactttggcgagtctcggacagctatttttataaataatgctatttcgccgggtcaggtgagcacattcaccttccgacttcctatattcttattatacctttcttacaggcgtttgtaaatacgcctatcgcgattttctttacaatgctttattctctttccaacgacctgatatcaggaacaccacaatcaatataatggcacccacggatgccatcggaccgccgagaccgacacccgtcaaaccaaggttcagcaccaggccaaaggccactgccaccggtactctgagaacgatcgccgacagcatattattcaccattgaaaaagcggtatgccctgcgcctgtaaacaggccgttgatacagaagacaaacggcatcagcagataatcaaagctgaaggtacggatatactgcacgccgtatttcagcatttccggttcatcattaaaaaggcgtaaaatatgctcgaaagatgtctgcgccacaataaagatgcatccactgatacagaatgcgatgactgtaccgattttgcatgttttcactgctcggtcccacttgccggcaccgatattctgtgcacacatcgttgagatggaggcccccatcgccacagccggcagcaccgcaaaactgttgaacttggccacaacaccaacggcggctgatgcattgacgccaccgatgatattgacaagagttgtaatgatcataaatgaaatgctcgtcacaccattctgaatcgcagtcggtgtccctaatttcagaatctttatcgctttttcttttttgataataaaagaagatggtttgaaatcaaatacaaagtcattgcggatcatcacgacgatacaggtgatcatgctgacggcctgtgagaatacagttgcaatagctgctcccagcgctcccatcttcaatccggccaccagtacaaggtcaagaatcacgttagtaatgcaggcaatcagtacaaagtacaaaggtcgcttactgtctcccatgccgcgcataaccgcactgaacacattgtaaccaaatataaaaatcaatcccagaaccgtcactgtcagataacgatcagcctctgcaaaggattccgccggtgtctggatcagatgaagaatcggtttcttgagaataagcattaaaacggtaatggcaactgccgcaatggttaatgtcgtaagcaatgttgccgtcgtctcctgcatatccttccgcctcttggctcccagatactgtgcgatcagtacagttccgcctgcacacagaccgacaacgatattcgtcagaatcagggttacctggcttcccagattcacaccagacatgctggttgtaccgctgaagcgtccgacaatcagcatatccgccacgctgtaaagagactgtataatgttggatgccagaaaaggcagtgaaaacaaaaccagctgtttcgctacattgccctccgaaagatttttctcaaaactgctcatgatgattacctcttttaaattcctgtaagtattggcagaacttttgcctgtcagaaaagcttttgtatacttcatgtttttgtatacttaattatacttaatatagtagcgtaaagcaccaataatgacaataggtattctcaagcgtaccatacctgccaaccctgttttccatacaagaagaacatttcgaaccatttttcaatttacatctaccaaaaaaaatgatatcctataaggtgtttgactactattaagtacatcatcaatactggggaatttaaaaaatgaaaaataaaactgcatttacaattttgacgattctagtcttaagttttctactttatctgtcaggcgggatttttgtacatcacggctctgcgaaaaacagcgaatctattgcagcggatattgatctgctcactcaaatggaagccaaaacgccgacagatttctcatcccgaaaaatcgaaaatttttccggcgatctcactgaggaacaggagaagatcatcgcaatgaaagatgactcctttgacaacagtgaaatgaccaaatggtttgaggacgtgatcatcctgggggattctatcgtcgaaggcggctctgcctatgaatggctgacgccatccaacttctcctccaagatcggtatctccgtctgcacagctgaagaacagattgacgctgctattaatgcttcgccatctcttcttttcatgtgttttggtgtcaatgatatcgagaattatggctcacaggtggatggatttatctctgattacagggaagcaattaccaaaatccaaggtgcaacaccgcatactgtgatttatgtcaatgcgatctttcctccgcaggacggtgttcaggatcgtctgccattttatgggtatctcgacgaatacaatacagaacttgaagctttatgtcaggaactcggcgtcacctttatcgactccggtttcattttaagagaactgccggaattatatgatgcggatggtattcaccctgtttccgcattttatccattatggtttaattatctggcagatatggcggggttaaaagacaatgaatagattaaagaaattgacatatatccaatacatcatctgcggcctgcttgttattttcattcttggcattctcctgtcaggtcatgccaaaaatgtcagttttgaaacagtccagcagaatattgtatcatgtgaaggtatcaataccctcaaaaaaggaacagcccgtgatatgcgaaagaatcttgatcttgacgaaagtctctttgactggtctatttactattgcggcaatggtctaatggatgtatcggagcttctgatcgtgaagtccgataactcagccgctctggaaacagctgaaaaagcggctgcttccagactggacgcacaaaagaccaactttgacggctacggcactaaccagattgaccttcttggtcatgccatcaccaaaaaagtcggcccttattatttttatgctgtttctgagcatgcatcaacgtgggaggaggtttttatgggtctcgtcaaatagaccctgaaagtacattatggtattcagtagtttaaatttcctgcttatttttcttccaatcgtactgctcctccattcagtacttccttttaagtacaaaaacattgtactgcttgcggccagcattattttctatgcctggggagagcctgtatatgtcattcttatgatcctgagcatcggattcaactacatgtccggtctcgtccttggcgagcttgaagatccacatttgcggaagcgccagcttatatttgcagtcgctgtcaatcttctgctgcttggattttttaaatatgccggtttccttgtcagcatgatcaatgccattcttcctctgaagattgaattcagatcactggcacttcctgttggtatttctttctacacattccaggcattgtcctatgtcatcgatgtgtacagaaagaaagtcaagcctcaggaaaacctgctgaactttgctgtatatatcacgatgtttcctcagctcgtcgccggtccgatcgttaaatattcagatatcgagcttcagctttccaaccgcagaatatcccgtgccaaattcggtcagggcatcgagcgactgctctttggtctttccaaaaaagtcctgcttgccaacaatctcggtctgctttacgaaaccattcaggcttcgggcagcagaagcatcatgacttcatggcttggtatttttgcctacacccttcagatctactttgacttctccggttacagtgatatggccattggtatgggcaagatgctgggatttacattccctgaaaacttcaattttccatatatttcagacagtatcacagagttctggcgcagatggcatatgacattatccggttggttccgtgaatatgtctatattcctctgggcggcaaccgtgtttccatgccccgtcatattctgaaccttctgattgtatgggtgctcacaggtttctggcacggtgcggcatggaactttatcctgtggggcctctattacggtattcttctgattcttgagaaatatatatttgctcctctgttgaagaagctgccgaaagcagcccgacacatctataccatgcttcttgtcatgttcggctgggtcttattcagcaacacggactttggcagtatgcgcacttacgtcggcactttatttggtatcggcaccaagggcttccttgatctggcgttcttttattatataaggaacaatctcatcattctgatcatgggcgtgctctgtgcaacaccgctgatcaggaattatattgtgcgatgcagcagaaagaaacctgaagtgacttccgcagtacttctgctccttggtatcctcagcattgcattccttgtatacggtacttacaaccctttcctttatttcagattttagtgaggacagattatgcagaaacgaaaagataaaatcaatcgaaaaaaatatcattctattctggtcattgccgcaattgctattgttgtcctcctggatgccggcatgatcctgatgccggatcatacatcctctgatatggaaaaccgtacactccagacatttccaaagctgacattctcaacgctggtatccggaaagtttgaatccgaattcgagacctatattgctgatcagtttccttttcgaaacaaatggatcacgcttgaatccacagtttcacgcatgatgggaaaaactgaatccaacgacatttttcttgcaaagggcggttatctgatccagaatttccatacgccatctgatgagcagtatgcctccctcctggaaggctacaaggggattgccaagcttacagaaggaacagatatcaccttaaatgctatgatcgtccctacggccgtcaacatctacagcaaaaaactccctttcggagctgtaaaaggggatcaaaaagctttccttacacagcttcaaagtgaccttgctgcttccggcatcaactggatcgatctttctgagccttttgccgcctgcgacaaagcaactcagctttactacagaaccgaccatcactggacaagtgatgcggccttactcgcctaccagacctataacaaaactctgggacttaatgacagcaccacttattccaaaaaaatactttccgattctttcaaaggtactttgtccgcttccagcggcctgcgtacatcagaaacggatgaaatttatgcgtatcttccggatcaggccacagattacactgtcagcctgacggcagaaaataccaaatcagcttccgtatttgacgttcaaagcctgtccaccaaaagccagtacaatgtattctttggcggcaatcatccggaagtcgttatcgattccgcttccgaatccaaaaaggtgctgatggtcttcaaggattcctacgcaaactgttttgttccgttcctgattcctgactatgcaagaatcatcatgatcgacccgagatattatacagaagatatttccgaaaccattcaatccaatggcgttaccgatattctgtttctgtataatgccaacacggcggctgaagaccacagtctttatcagctgaccgcccaataaactaaaatacactaaaatacagcatcatgacaatcctatcagaatcgtcacgatgtgaagaaaggccctgtacttcggcattcaccgaaatacagggccttttgggggaaaatgttcacttaccagccaacacaatctgcgccattagtcttcaatatgtgttgtggttgttgtgaggccattggcatcagcatctacattgatgcagtcgcccggctccaattcattgccaaggatcattttagctaccatggtctcgacattcttctggatataccgcttcaacggacgtgcaccataaaccggatcataaccatgatctgtgatgtaatcctttgcagccggtgtcagctgaagtgtcagttcctttgtctcaagacgcttattcagacgaccgatcaggatatcaatgataccgctgatgttgtccttcgttaacggcttgaacataatgatctcatcaagacggttcaggaattccggtctgaaatgtgctttcagatcattcatcgtgttctgtcttgcttcatcactgatattgccttcgctgtcaatgccctccagcagataggaagaaccaatgtttgacgtcatgatcagaatcgtattcttaaagtctaccgttctgccctgggaatcggtcacacgaccatcatccagaatctgcagcaatacattgaaaacatccggatgggccttctcaatctcatcgaaaaggataacagagtaaggttttcttctgactgcttctgtcagctgtccgccttcttcataaccaacatatcccggaggcgctccgatcagtctggacacggagaacttctccatgtattcactcatatctatacgcaccatattgttctcatcatcaaacagattctctgccagtgccttggcaagttctgtcttaccaacaccagtagggccaaggaacagaaacgaaccaatcggtctgttctcatcctggatacctgccttggatcggataatcgcttctgtaaccttcgatacaccttcttcctgaccgatgacacgtttgtgaagttcatcgtccaagtgaaggatcttattacgctcgctctctgtcagctttgcaaccggaatacctgtccatctggacacgattctggcaatctcttcatcagtgacacgttcacgaagaatagaattctcttctccatggacacgcgcctcttcctcttccagctgtttcttcagctgaggcagcttgccgtactgaagttcagcagccttgttcagatcataattcctctgagccaactcaatctgcttgttcaggtcttcaatctgttcacgcaggctctgcagcttctcaacatcctgcttctcatcgtcccatttagccttctgaaccttgaaatcttctctcagttcggcaatctcatgggtaatgttctgcaaccgttcctgactgagcttgtcgtcctctttcttcagagcagcttcctcaatctccaactgcatgatcttacgcgaaatctcatccaactctgtcggcatagaatcaagttctgtcttgatcattgcacaggcttcatccacaaggtcaatcgccttatccggaaggaaacgatcggtaatgtatctatgtgaaagcgttgcagctgccacaagggcaccatctgtaatcttaacaccatggaaaacttcatatctctctttcaggccacgaagaatggcaatggtatcctcaaccgtcggctcatccaccataaccggctggaaacgacgctcaagcgccttatccttctcaatgtactgtctgtactcgtccagtgttgtcgcaccgatacagtggagttcacctctggccagcataggcttcagcatattgctggcatccatggcaccgtccgtcttgccggcaccaacgatcagatgcagctcatcgatgaaaagaataatctcgccgtcactcttcttgacctcagcaagaacagccttcagacgttcctcgaattcacctctgtacttggcaccggctaccagtgcgcccatatccagagaataaatcttcttgtccttcaggccatccggcacatcgcccttgacgatacgctgtgccagaccctcgataactgcggtcttacctacaccaggctcaccgatcagtaccgggttgttcttcgtcttacgagaaaggatacggataatgttacggatctccgtatcacggccaatgacaggatccatcttctgggctcttgccttgcctactaaatcttctgcatacttactcaggctgtcataagttgcctcagggttatcacttgtcacacgctgattacctcggacagtggaaagtgcctgaaggaaaccatctcttgttacttcaaaattcctgaataatgtcttgatatcactgtcggctgtctcaaacaatgccaggaaaaggtgctcaacagagatatattcatcatccatctgcttcgcttcttcctcagcccgtaccagtgtacggttcaggttatcacctacataaacctggccgccggataccttgacaagcttctcaacaagcttcgtcgcctgtaccttaaatccttcatgattaattcccatcttcgccagcagtctgtcgatcaggctgtcttcctgggtcagcaggctcagaagcagatgttcctgttcaatcttctgattcccgtactgataagccagtttctgacaatcctgcactgcctgcagggacttctgtgtaaatttatttaaatccatattcatgcctcctttggaaacaatgtgctaaaaatcatcttttgtcatctatgtcaaacacagcatccatttgatgccgcgtcaattttcttctcatacgctactttcttctctgcagtctctcttcagccattcaccctcttttttgttctatacgtaatataacacctattattagcactgtcaagaggcgagtgctaattttttgtaaaaaaatttgaagcccgcattttacgggcttcaccgattttccagtccttttatactctatcgctttcaaactatttaattcagatattcacccactggagaagaattgtactgtttcttaacctcaatcacaatggatccatcctcatttgttttttctgataagattttgtacttcgtcccattctttttcagctgggctttatacttctcatattcctgtacaatcgctttttttgcatactctgttgtctctccgtcataattggaaaaacacaatgtctgagtgatacaagctgatttaattcttttcataaccgctacctctctttcatttttacagatacatcacatagaaaaagggacctttcactcagtaaatttgaatgaaatgatccctgattttcatataaatcgtacttggtttttacatttcttattatactttatttttttcatccggcgtagtcaaatataatatatccactattttacaaacgcctgtcactggtttactgacaaagtctccaatttcatatttcacagacttctccccttactgatttgtgctctttacaacagttctcattaataacattccataatgatcttctcacatctgtcatatccaagctgtgagctattcagacacaacgtgtagtttccggcatatccccatttctgctctgtgtaaaagttataatttgtcatacgtcttttatctgtgtctgccatcattttggcagcctcctgtgcttctacattatgtaaacgcataatccgctgtgttttttccggcatatccccatgaataaatacattcatcacatcatctctgtcttttagaatataatctgcatttcttccaatgatcacacaaggtcccttctcagccaatgccagaataacttttctctgcgcctcgtataccatatcttccaccgatttgcctgtcatatcacgtccggcaaatgcataggcaaacaacccttttttcggagataattctgcattttcaagaacatattccggtgataaaccagatttttctgcaatctcattgataatatttttatcgtaataagcaattccaagttttttcgcaacttcttccccgataaaacgtccaccgcttccaaactctctgctgattgtaataattctttttgtcatctctgattcctccttaacttaaaacggctactttattttttctgattttatttaaaaatacataaccgaccaggcatgcaatcacttctgtaatcgggaatgcccaccaaatcagtgaaacgcccatctgtccatttctgacgaacagtgaaaagattccagccaatggcagaatgataataagctgcctcaaaagtgaaataaccagcgattccacgcccccgttcagtgcctgataaataccctgataagcggcattgattccggcaaacagaaaactgatagagatcactctcatcgcactgataaagtattctcttgactgtcctgcattaaacagcgttgcaaatgcgcccggaaaaatctctgtgattgcaatgccgagaatcattaatgctatcgtatagatcagaccatacctgatgccatcctgtattctttttttacttctcattccatacgcaaatgcaataatcggcgtgatcgcatctcgaagaccaaatgcaaggaaaagaacaaactgctgtaccttatagaacaagccataggctgtctgtgcggaaggattgaacttcagaattaaattcatcacgtacaccattatagacatcagagcctgtgcaataattgccgggagtccgatagcatagatttcttttataatgcccgcattcggcttcaagtatttcacatcatgttcaaattctttattcagcttcatatggaaaataaacagtaaaactgcagaggctacctgaccaatgacagttgcgtaagcggcacctttcacgcccatttcaggacaaggtccaataccatagatcataatcggatcaaggacaatatttacaattgcgcctaccacctgtccgatggtcgaataaagggagcgccctgttgcctgtaacaatttttcaaataatgaaaagaaaacaataccaaaagaaatcacacagcatatcctcagatagctgacacccatttcaagtacttctgtatctactgtctgtgatgagatataggctctcacaccaaagaagccaaacaacaaacagaccacataaataatcacaccaagaaacagactattccctgctacctttgcagcttttttgctgtttccctgtccaagtgtccttgcaagaagtgcattggttccaacacctgttcctatacctgctgcaaccatcagcatctgaaccggaaatacaagcgtcaatgcatttaacgctgcttcacttccctctctcatattgcctacaaatgcactgtctacaatgttatagaccgcctgcaatgccatagataaaatcatcggaatccccatttggaccatcagcttattcaccggcatatccttcatcttattgctttccgccattttgtttactcctctctttttctgcacaaaaaaatgcgtaacctgtcaaataagctggacttacgctgacatgctacacactttttcatgacactattatttttaacaaaagaaaacgagcagctggtaaactggatttacgcttacttgctactcgtttgtaatcattatatttcctgtttttcaaaaagtcaaataaaatttcaataggaccaaataccttgtgttcttcacaactcatttttaacctttctatttttaaaaatatatttgacatttccggtaaaatatccctattatatagttgtttttgatttacagaagaaaggatacactaaaatgattcatataagacttgccagtaaagaagatatccagaatatcatgcccctctacgcctatgccagaaaatttatggctgccaacggcaatccccatcaatggaacggcaattatcctgcttcagaagacatcctgaaagacattgccaatggcaattattatgtctgtacgccggataatgcgccggagaaaattgtgggcggttttgctttcattataggaagagaaccgaattatgccgtcattgaaaatggtgcctggcactccgatcagccttacggcacaattcaccggattgcctccaacggtcaggtcaaaggcattgcccgagcctgctttgatttctgtcataacaaaatagactgtctgcgcattgatacccacgctgacaacaagccaatgcaaaatgccatcgacagttatggcttccgctactgcggaattatccatgtcgccgacggcacaccaagaaatgcctatgatttagtttaatcttcatcgtgacgtattcgcatgtaaaattgctgcgcagtgccctatccggcaatcagcatacacagtggcatagtcaggattgaaagcagcgttgtcactgtaaaaagctctgtcgcataatgatcatcacgctcatacataatcgccatcgtaatcgtcatggcaccggccggacacgctgcagtcactgcggccactgtccgcatctgatcatcaatcggcagaaatctcagtaacaaacagaacagacctgccgaaacgatcaggcgcagtaacgccacgaaaaagagtcttctttttgtcaaaatctccttaaaattcagctgtgtcataatcgcgccggacaaaagcatcgccagcggcgtattcatatcgccaatggcacccattgcaaaatcaatactttccggcagacgaatctgaaaaataaagaataccatacctgcgatgaccgcaatgaggcacggattaatcagcttcttcagctgaaaaccgcctttatccaacagcatgatgccatgtgtccagcagaaaatatgaaaaacagcgacaaacacggttgcatagataacaccgatatttccaaaaagcgcataaccaagcggaacccctataaatccacagttatcataggtcactgcaaacttctcaattgacagatcatacccttctctctcatgcaagaggaaatgaccaatcataatggaaatcagataactgatgacggccaacacaaaaagaaggcccatttttttcagcaactcactgtcatactccatctgaaaggaagtaaaaatcaaaataggattcacaaccaatgtgctcagtctggacaaacgctgttttgtataatcatcaatgattcccatcttacaacagatcacgcctacaatcataataataaagatagaaataatctttccaaataccgttgcaactatcattcgctatgctccgcctttctctttaactgtccattttttcaactcatataatactacataccggtataccggtcaacaagcctatcagcactttaattatgaaataacgatttcccatatggaacagcaaaaaaccatcagcctggaagatttataatcctccgggctgatggcttttatgtcaccttatgggtatccgttctgtcacaatcataacaattgtctacattgatgatacatctctgattacctcaaataattatctgtataataaaccaattatgcaatctttggataatcaatcaccgtaacttcctgcattaacttcttggccatatcaacaatcctttcaagccgatcagcaacttcatccgtataatacttctcgccgcactgctcacattcaaggcatggaacatttttaatcacaataatgcaatctttataatttacgacgtgtgttgttgtgctatttacagttgtattattcttacaatacatacacatatccatcacctctttcttcgagtctttaaatcattttcaaacctctttcctgcattcgttgcaggcaatgctgtgtccaaagaattttggattccatgcataatttttgatatatttctaaattcatttttcttttccccttaacattattgcaattaatcatagcacatcttttttatcattcccatcactttcctcccctctttgcccacaacatttcgacaagattcgacaacttttcaaccacatctatataaattgacacttttatccacaaaaaaggctttataatccaaagtcatctctaattctaagattataaagccttccaacttttgaagctgattctaaacagctccaattattttcattatttaagcatccaattacaatgttgttccatggtccacaattaagtactgacctgtcactgcagctgatgcgtcctctgcaaagaacagaatagcattggcctgatcctccacactggattccggcaaggacatatccatatgctgcgcacagcgttctgcaaaccatgtagaaaattcagcgactttttccggtgtattcagcggtgtcggtgttggtcccgggcaaacggcgttgcagcggataccgttcggtgccagctgaatagccacgttctttgtcatagccagtgccgctgattttgctgctgaataagaaataccaccgttgccgaacacaccgccgatggaagaaacattgatgatcgagcctttgccggacgccatcatatgtggaatcgtatccttcatcatgtaaaacagagaactctggtcaatggcgataatctcattccaccactcatctgtacactctgtaatcgggcggtgcttatccacaataccggcattattcaccagaatgtccactttgccaaacgtatcaacagccgcttttacaaccgcactgcagtcctcatggctggacacatccgctttcaccgtcacaacctgaacaccatatttgcggcattcctctgccacttcgtccaacgcctcttttctgcgggcacacaaaaccagatccgcaccctccttcgcaaaaagaatcgctgttgctttgccaatacctgaattaccgccagtcacaatcgctgtcttattctctaatctcttcatcgttatactctcctttatcatattccatttgttatcctgttctttctcacttatcatctgtgaaacgccaagtttttcacctttacatttgcatgccaccgcacaccggcatggccattcccgtgatatgtcccgccatatcggaacacaaaaatactacagcatccgcaacatcttgcgtcgttcccatctttttcatgggtataatatgatttttcagaaattccgcatcctgcgcaccggcatcaatactgtcctgcatgagtccggttccttccgtcggtcccggacagatcacattgacacggatacctttgtctgcattttccagagctgccgtctgggtaatggcgatcactccggcctttgatggaccgtaagcaccaaatcccggtgccatcctaagtccgccgatagacgcgttattaacaatggcgcctcttccctgtttctgcatctgcagaagttcatatttcatacaatgaaaaacaccggtcagattggtattgatcactttctgccagtcgctttccgccacctccgtcagtggcgcaaaaggaatatttttgccgtccgccccacaaccggcgttattaaatgcataatccagtgaaccaaatgtcttcaccgttgtctcaatcgctttacggacagaatcatcatctgtcacatcacattcaacaaaaatcgcctcaccgccgttttcccgtatagtctgcaccgtttccaatgctttaggatttctggcagccacagccaccctgcagccaagaacgccaaaacaaatagctgcggcctgtcccataccggaagccgcccctgttacaaaagctgtttttccttcaaattctttaaatattttcatccgcttctcctatcagataaccatagccgaacttcttaatcacttctttttcccggacaagtccttctttgataaattcaataaaatactgccctgcctgggtatccgcctgattcttcagacggccgatgccgataatagccggtgcaatatcatccgttatcgtacaaatccgaatatcagaatccgggtgcagattcaacatttcacaggccatcacaatcggaatgatcgccacaccgcgattgtcattgagcagattgtacataagctcattgctctgcacttcgtatcctaccttcggtacaaaatcatacacgcgacaggcctgatacagctgacttaactgaaatctgaaggtatcacagataaacgtcgcctctttgagctgtcccatggataacttcccgcactccgccaacggatgatttttgtgcataacaaatacataaggattgctgtcaatcaactgaaaatcaatccgttcatcctcgatcatttcattcgacaatgcataattaatatttctgtccagcaggttctgaaccagctcaagtgttgtaaaatccagctgccttatgccgatttccggatgagcctctgaaaatctcggcagccgaatagccagataatgcaggatattgcttcccaatgataaaatattctgatttaatgtgtatgttctttggacattttccatcccggcctttaactctgcaaaagcaatgtccacgctggaaagaaatatgcggccataatcattgagcacgattttgccttttcggtgttcaaacaacggcacaccgatttcttcctccagctgtgcaatacgtttgctgagatttggctgcgtaatatataattctctggccgttttggtcatgttgccgtttcgggccaccgcctgaaaatattttaaaactgtaaaatccatctctttccaccgcttccgtcattcctgatcgttccgataaaccttccaaaagccgtaaaacaactgtcctttttatatacgcatggctgcataataagcttcatgattggctctgtaataagtaccgcctcttgccgtacagtcgcccaccatgatcacatctgcactgccgtattttgccagaagcactttgccaaggctgtcatccggtttgacacccagcgcattcacgacactatccgccggatagaaatgcttttcgccggtgactgtatccaccgtttcaaccccgtcctttaccgcctgaatccgctgtccgccaataagtgctgcattcagattctccagctgatccaacaaatccactttgttaaaaatcggcatttccataataaaatcttcccgcttcagctggtccacaacagtgacacttttgccctcttttgccagtgtaagggcacattcaagtcctgtaatgccgcctccgcaaacaaccacattttcaccggtctcaacttcatgggcatccacggcacgaacggaaagtgcattttctatccccggaatcggaggctgaacataaacagaacctgttgccacaataatggcatccgggttttctttttcaattaaatcctccgtcacttctgtattcagcagaatttccgccccacatttgccggtttctctgatatcccagtccagatattcccgcatcagtgttttaaacggtacaaggcaggcatcgtttaataaaccgcccagtctgtaggatttttcatacagtttgacactatggcctctctgtaccagtgtctgagccgccatcatacccgcaggaccaccaccgatcaccatgactttctttcgttcattttccgatacaggctgaatctgtccgctcacaccacagcgcggattgatggcacagctcatattggttccccatgtattggcattgccgcaaagatcgcaccgggtacacggacggatttctgcctgctgagctctcagagattttctgacaatatcgccgtctgccataaaacttttggccatggctacaatatctgccttacctgacgcaataatctcctccgcctgctccaaagttgtgatcatccccacaacagccaccggcacatgcagatgtttctttacttctgctgcataatccacattcaacggtttgtgaggttcacgaaaatatgtcggtatacaataacgggccgacaaatgaaaaatcgaaccctgagagacatggacgatatccacatactcctgcgcttctttcataaatgccagagattcctcaaattccatgccgcccggaataccttccacagcagaaactcgcatctcaatgaccatatcttcaccgacagcttctctcactgccttcagcacttccaatgggtatctacgcctgttctcaggtgaaccgccatattcatctgtccgcacattggaagccggtgacagccactgggccaggaaattctgatgggcacagtggatcatcaccatgcgaaatcccgcatgtttgcagcgcagggcacagtctgcataatgggctttcatctcatccatatcctgtcgattcatggtacgcacattatcttctggattcaacggtctttctgcagaaacaatagcaatgggtgaaccatcctgaggcgctctgttgccccggcccgcataggccagctccgcagaaatttcggcaccattctgtcgacagacttctgccagcgcattcatcccatgaatacagtcatcatcacagacattcatctcacataaccaatgtgaagttttgtcatgggtcaccggtgtatcacctaccgttacccaacctgcaccggtttttgcctgccaggccataaaatccaacatatcctgtccaacagtaccgtccgcattgcacttcagaacaaccgtcggcgcatattccagtctgtttttcaacgttacaccgcgaattgtcagcggctgaaaaagatgcggatataaattctgattcatactcatcccccataattcattgtcaaatataacgttattatcttcacttttactatgagtatagcaatcggaagatgcaatgtaaaatgcccattttgatattgaggtataaccgcagcgacataacttattgcatttttgcatccgatttatttaaaaccctaaaagcagcgaaaggccgcagcccaaatgggctgcggcctttttgattcaggacttgcttacaattcctgcgcttcatatacatttattttttactggatagagatatatttcttctcttctacagcaggttttgcttctttcttaggtacgaacaatgtcagaataccatgttcaaaggatgccttgatatcctcttctgtgatatcttcgccaacaaaatagcttctctgacatgcgcctgcataacgctcacgtctgatgtacttgcctgtcttcttgtcttccttatcttcatcaagaccctttgctgcactgacggtcaggtaaccattattcaattcagccttaatctcgtctttcttgaagcccggaagatcaatctcaagttcatagccattgtccaattccttgatatctgtcttcatcagattgcctgcatggtgaccatacagtttcttctctgccttatcttctgctctgttgtcataataaaatggaaaaccaaagaaatcatcaaataaattattgttaaaaatgctaggtaacataagtcatatctccttttcaatcaaatatctatattccaatctgttaactgttattgtctaaaaacatctgagccgatgaatcattatccctcaatggatatatatttcttctgctctactgcaggctttgcttcctctttcggaatttcaagcttcaaggtgccatcctcgaacttagccttgatgtcttcctgtttaacaccttcaccaacatagaagcttctgctgcatgaaccgctgtaacgttcacgtctgaggtacttgccctccgagttcttctcatctgtctgcttattcgatacagcactgacggtcaagtagccatccttcagttcagctttcacatcttctttctttactcccggcatgttcatcgttacttcataaccatgatctgtgtctttcacatctgtggtcatcaaacctgctgcattataattataatctccatcaaatgggaatccaaaaaagtcatctaacaaattctctccaaaaatactaggcattaacataagtcatatctcctttcaaaagatatcttaaaatctaatcaagcactttcggatcactcctgagtgttatcaacattttcaactccggattcggaactcttctttttgttccccttcctttgttctacacgtaatataacacttattgttagcactgtcaatagatgagtgctaattttttgtgaacattttgtgaactctacgagtcatgcaaagcagaaaaaatttcatctgcagccagaccaaaggtatggttgcatgggcaaaagaaaatgtagcttcttccggattatctgacaagccactcgactccctgttataatactcatcaatacgcatatactatctatatctctatgatcattgaataagacaatttatttataatattgtcttgtacgcaagacaatattgatatataattatctcatatagaaagaggtgacatatattatgaatcgcgatactttaaaacaaatcatgattgatcaaaaagatatttatctcaacaatccattaataacaagacagtattctctagaaaccaatgtcaattattgctttgttggtatcagaagaaccggaaagtcatatatgatgtatcaacaaataaaacaattagaagacaatggaattcccttgtcccaaattgtttatgtgaattttgaagatgagcgtcttttggaaatgactgctgaagatttaaatctcattttagaaattggattagaaatatccggaactgatatcaagccatatttatttttagacgagattcaaaatattaacgggtgggagaagttcgttcgcagaattgcagatatgaagtatcgaatcaatattaccggcagtaatagtaaaatgctaagcagcgaaatagcttccactttaggtgggcgttttgttattatgaatatttatccatattctttctctgaatatcttattgcaaataatatgacaaagaattacctggatgttattagcaccaaagacagggcagatgtccaaaatcaatataacaaatatgtaacctatggagcatttccagaattagttgagataagaaataaacgagcttttttaaacagcatctatcaaactgtatatctcggtgatattataaccagaaataaaatcaccaatgattttgcaataaggctgatcctaaagaaaattgcagaatctgtcacaaaacctttatcgtataaccggctgactaatatattaaaaagtggtggaatgtctatcggtaaacaaaccgtaataaactatgtcagctatatgacagactcctacctgctctttactctgcaaaactatgccgccaaacttgtagaaaaagagacttctcctaagtattattttatggataccggacttctaggacttatgctgctagactgcaaatctgctcagctggaaaatcttgttgcaatcgaactgatgcgacgttatggtaccgaaaatgtctatttctttgagaataatgtagaaattgacttttatgtaccattagacaatcttgctatccaggtcagtatgcaggttctggataacatagatacaagagaacgtgaaaccagagcctttgtgaagctaaataattttatccccaacgccaaatgtattctcattactaatagcgaagagacggtgattgattgcgatggaatcaatattgaggtaattcctatttggaaatggttattggataactaatcgagtaggaggcggtgattaaccgccgtcctctcaattctcataatcattacacaatcaaaaaaggcgcaaatcatatcatatgatatgatttacgcctggcttcatactgatttcagatatattgttctaaactgtcaggaaactgtcaaatcctaccttcacatttccaaatttcatgcctgttgtctgtgagattgcacgtaccagtgcttccgcaggcagcattttccgtatttctgatccgctcattgtagttctccccgcaatatccccatcaggatgtaaaaaaataacagacatcccttaactcccctgttgtaggggcttttcgagatgtctgcaaagagagccgcatcatggctgttcctaatatttatctttatgaaaatggaaaatgttatgatgccagcattctgattaaccgggacgggcagattaccgagattcagaagatggtacatgtaactcaggcggactgaattctacgaatagccgcttacaggttttccaatatataaaaacgattgttttcctcagctgcttttttccgcattttcgtgtaaagcagctcacggtcggaatcatcatcattaatgattatttcgacaattgtccagatatcctcatctgaaagattggtctcaaaacatgaaaaaaagataacagcaccaaattggctgtatggagctatatccgatgtcggcaattcgtaatccgggaaccgtttttgaaattctgcaagccagctttcctctatcggaacatatgtatcacggatgcgcgcattgtgtaccacgcgaaggccaccgtgattacccttgatgatgattccccttttttctattttgttgcacaaataaacatactggagtgtatctgcaatatcgcccggcaatgcaactgtgcgaatttgtgttgtaggtttgatacgttcgaacatgtgatgattttcctttctgttaaaaagagactgttttttttctgtgaaataaccagaccaatgaatatcagtgccgcaccggccactgaggccatggtcattttctcatgaagcaccagaaacaggaaattggcgaggacttccggcttcatcagtatctccggtttccagctggctttctgctggatcagcactgggatcaaaaatagaataccatagaaatacactcttcttgtaacggccacgatcggatattcccactcaccgattttcttgatcagcgccgaatagcagccccatgagatcatcgccaaaaaggccagaccatctccctggggattaagctgcagatttttccgcatggcgcctatctcaactaatggtaaccgaaaatctatatattttcaatatctatccattttcttagcgcccgacatttcaagttttccccctcccaaaaaactaaagaaaactttaccataaaaattgtttttaggggggttgtcttttccagatttttctgttattatccaaaaggattatctctatgcgagattccccacttctataagtggtcaatcattgacaaaatttgaaagttaaacggaggtgagttttcatggacagttgcataggtcgaagtaagatatgcggtgaacagaagtatacagtcagaatgcggctattcggaaagctcagccttagacccataagcaaatcttaatacaatatttgtgcctgcaaagcagacacaacctattcgtatggaatttgcctctgctttgcagacatggtgcctttgggcaacctcttttctatacgcattctatattttcgtgcgttcttttgtacatcgcatccaacagtctatgctattaaactgaaacgtgaagcgatgtattttttatgcccttttttagggagaaaaggaggacgacatgaaaagaaaaatgttttacaagaaagattatgtaaaagaactgttaaagattatccgcacagaaacagataccaccaaattgccaaagttgctttccgattaccatgagaaagatattgctgaagcgatcaccttactgagcgaaaccgaaagaagacaactctatcctgtcctcggcgcacagaaagtggctgaaattttttcctatctggatgattctgagaaatatattgaagaactgccgattgaaaaggctgccaaagtggtttcttacatggatgccgatgatgcactggacattctggatgatctgaccgaacacaaaaaacaggaacttgtcaaccatctggatgaagatacccgaaaggacgtccgcagactgctttcctatgatgatgacgaaatcggcagctgcatgaccaacaacttcatctgcatttccgacaaattatccatccgtgaagccatgagcactctcgttcgccaagctggtgaacatgacaatatttccaccatttacgttgtggataaggatgagaaatttgtaggtgccattgatctgaaggatttgatcattgcccgcgaaaatgatgccctgtccgacattattagccgttcctatccttatgtctgcgaacatgagaaaatcaacgactgcattgacaagattgccgattacgaagaagactctcttcctgttctgaccaaagagggccgcatcatcggcatcctgaccgcaacagacattgtggaacttgttgacgatgccatgggcgatgattatgcaaagctcggtggtctgacatctgaagaagacttaaatgaaccgaccatcatcagcatgaagaaaagactgccctggctgatcatcctgttatttctgggcatgggtgtatcctcggttgtgggtatcttcgaatccgttgttgccgttctgccgattgttatttgttttcaatcactggttcttgatatggcaggcaatgtcggcacacagtccctggctgttactatccgtgttctgatggatgaaaacctgaacacaagaaagaaactctaccttctcggcaaagaaatgagaatcggtttcttcaatggcatcagccttggcctgatggctctggtatttctcggtgtctacatccactttttcaagaaatacgcatggctttccgctttcctgatctctggctgtgtcggcctctcactgattgtggccatggtagtttccagcatgatcggcaccattgtgccaatgtttttccacaaaatccacgtggacccggcggttgcatccggcccgctgattacaactgtcaatgatctggtagctgtcgttacatactatggactggcaatggtattcctgattgatgttttccatatttgacaaaagtctccttatggtttatattagttcataaatagacatttcaaatttgaactaattattccataaggaggctttttgtgaaattaggtattgaattttcaaggaaactgtctctggcctatgaaagcatgtgcaaaccgctctgccatgaactgaaactgccccagacagcttttgatattcttatgtttctggccaataaccctgaattcaaaacagccagagatattgtcgaagtccgaaagcttaaagcgaatcttgtctctgtcaacattgataagcttgtaaatgaaggttatctaatccgaaagaatgtagaaggtgaccgacgtaaagtccagcttctctgtaccgataaggcacagcctatcatcagcagaggccagcagctgcaagaacactttgttgaacaactttttgcagacatcgacgatgccacacgtcaaaccatattccagggtatgcagcaaatggaactcaatctgaatctcattctggaggacaactagttatgcatttactttttacgattattgttactttttttgccggcatgggagccggtctcggaacaggttttgccggtatgagtgctgccgccgtcatcagtccgattctcatcacctttctcggtattgacccctatatggccgtaggcattgcattatcatccgatgtactggccagcgccgtttctgcttatacttacggcaagaacaagaatctggatatcaaaaacggcctgatcatgatggttactgtcctgatcttcactgttgtgggcagctatatatccagcctggttccatccgcaaccatgggcaatttctccgtctttatgactttcctgttgggtatcaaattcattgtgagaccggttatgactaccaaggaagcgatgcagggcgtatccgctaagaaacgtgccatgcagtctgttatctgcggtatcattatcggatttatatgcggctttatcggtgccggcggcggtatgatgatgcttctgatcctgacttctgttctaggatacgaactcaaaacagccgttggaacaagcgtctttatcatgaccttcaccgcatttaccggagcagtctctcattttgccatcggcggcctgccggatcctgctgtctggatcctgtgcatcatcttcactctgatctgggccagaattgctgcggtattggccaacaaagccacaccaaagacattgaaccgtgcaaccggtgtaatccttgttgttctcggtgtcgttgttatggcgttctcatttttatcgtaaataacaaaataaaacacactctgtgaattccggctcataattcacaaaatttgaagcactcattgcataaatgagtgcttcacttgttttacggcgttaacattttctttcgccgattatctgtttttaaccgagaattttcaccgaatcgtttttcttgttctctcaaaacaattcctttacagtcggataaatccttctgaaatactgatagcgttcttcgtatttcctggtcagctcaggttccggtgtcactgtgtccaccaccttgacaatctttgctgctgcagtctccacattcggatattctccgcatcccacagccgccagcatagcacctccgagtgccgggccttcttcattctcaagaacatccaccttcagattcattacattggcaatgatctgacgccacagagggctcttcgcaccgccgccgcagatctttgttctctctgggctgataccgagacttctggctacctccagagaatctctcagaccaaaagcaacaccttccaggactgcctgggtcatttcctctcttgttgtatccatagacatgccgatgaacatggctcttgcgtccggattattgtggggcgaacgctcacccatcagatacggaagaaaatagacatgattatcccccagcttcgtaattcccgtctgctccgcgctataatctttggttttcagaatttcttcattccaccatttattgcaggatgccgcactgagcatgcagcccatcaggtggtaatgaccatccgcatgggcaaaggaatgcagcgcattgtattcatccacaccgaaatgctcactggaaatgaaaattgttccggaagtccccagcgaaatattgcatttgccttctcccaccgtacctgttcccactgccgctgctgcattatcgccggcaccggcaataatttttacattttcagaaaatcccagttcctctgcgatttcctttttcagtgtacccaccacttcatagctctcataaagctttggcagcatttctcctgtaataccgcagatatcaagcatttccttcgaccagcagcgatgcttcacatccatcagaagcataccggatgcatcggacacatctgtacagaaaataccggataaccgataagccagataatccttcggcagcatgattttcacaatcttcgcaaaattctccggctcatgctttcgtatccacagaatcttcggtgccgtaaaaccggcaaaggcaatattcgctgtataagcagacagcttatccttgccaatcaccgtattcagataatccgtctcctcacctgttctgccgtcattccacagaatcgccggacgaattaccgcatcatccgcatccagcacaaccaaaccgtgcatctgcccaccaaagctgatgcccgccacctgagacctgtcacactccgccgtcagctccttcaagccatccatcgcctgggtaaaccaatcctccggatgctgctccgaccatcccggctgcggaaaaaacagcggatactctctggacacaacttttttaatatcgccggtttcatccataagcagcagcttcactgctgaagtccctaaatcaattcctatgtatagcatttctctcatttccttataaaacaatcaaatgtaattacttcatatcaactgttcaattaatagttcaactaaatatatcaactaaacatcaatacatcaactaaaataagacatttcagttgatgtattattgaagtgtataaaacacatgccttccatgccgattttttttcaacaattcctttttaataagcctatttatcgcgacagatgcaccttgtatcgtagaaattgtatcaattacatccacaatttgttgagtcgttatcattccatttgctcttacatattgatatatcagtttgtctgttcgatttaaatcaactatttcatctgtcatatcattaaaattaagttgttttggcatactctcgtatttgacattaatgtaatacgtcgtccatcgcccacgattttctacaataagcatatttttctccaccaaatctgctaacaaccgtcccacctcaattgaagataaatttaatacagactgtaaacgagtattggacactttctcctccaggtaagctgtagaaagaataatttgctcttctgcttgcaacaattgataatctttcccaaatacattatataaatattccgtacattcaattggcatcaatgaaaccatccataatctcaactcaacctgatgaagctcctgatcatcatataaatcgggttttctccaattttccgctccccatgcatttaaaattgtaggaaatcccgatccaatattatcccccaaaccaatcattctaaacatattctggattttaggatttctagctaccgaatgaccaccctcatatatagcctggaccggcaattttaaatttcctggattagaaaacaaaaaaccatcctcatatttaataacttttaacacgcctgtactgtgatagtctgcatggataatcatatttacagtagcttcacgaactgccttatggactgctgtatcatctatccttatcattccatccaatttaaaaggccttttcaaatcacttactaatttaggtaaaattctttttatgaaattatacaaattattttcccatgaaccatcataagttaatctgtcattccatcttatgttttctgaaagatttgtctgatccaaataatccatacgaatattatcaaatcgttcccgaattgctagtccttttccaaacattaacaatcctgctgtcgttaatccttccctttttgttgttcgctcaaccgtatatgcccccagatttcttaaaaactctttatcttcggcattattccaaacatgatctggattatgacgctcgtattctattcgatatgtcttaagtgtatttaaatctatatcttccattgtaaatccatctaaaaggccaccgtcaattcccgaatctgaagagtctctcagcatagcttttacttcttcttctgtacaatgataatctccttcatgattgcgtttaaaactcccctttataggattttcatttatatataccggcttgtgtctataatctgcctgtggtacttcaatccatagtacagtatgaccacttatatcacaatatccaacattatcatctaataaaatattggcactgactttattactatttatagtatcccaaaattcttttagtctaacttctggatttttaacatctgtaaacgaaaagcgtttttgaatattcgtttcggacatatgctcttctatacctagtaaaattgtccctccacaagtatttgcaaacgcagaatatgtttcccatacagattttgatatttcatttcgtgaatccttgcattctagagtaattctttcaccatattttaacaattctaaaatatcttctctttttaacatttcactccttctttcaaatcccacacctgtcgttattttattataaactttttgctaaccaaaagctattctttttgggttattaaatctgttatcttacaacattcaattcattatttctttgtattttgacataatttaaaataaataaacattttctatatctaattttattttgctttcaccataaataaaacatggcttgcaaaaaattcttattcatgcaagccatgttttatcattctatatcacatatgaagtttcgcatcctagtatttttattagccccaaggattttcagttgggtaccgcacgcctgccggctggttatagccaatctcctctaccggcacaccgatatacttaaatacctcaaacagtgccttgccataatgaccgaatgctactgcgccatgatgcgggaagcctttctcaatcagaacgtgacgatagaatctgcccatttcaggaatggcaaagacgccgatggaaccaaaggaacgtgttgccacaggaaggacttcaccctgggccacataagcacgaagcttattgtctgctgtgctctgcaaacgataaaatgtgatgtcacccggtttgatatcaccttcaagagtaccctgtgttacttcttcaggcagtgttcttgccatgatcttctggtacttcatctcgcagaaggacagcttgctggaagctgtattgccacaatggaagcccatgaatgtatctttctgagtatagttatatttaccctttatatcgctgttgtacatatcagacggtacagaattgttgatatccaacagtgtaactgcatcctggctgacaaccgttccgataaactcgctgagtgtaccgtaaatatccacttcacaggataccggaataccctgagccgtcaaacggctgttgacataacatggcacaaagccgaactgtgtctggaatgcaggccagcatttgcctgtcaaagttacatacttgcgatagccgcggtgctcttcaatccaatcttttaatgtcagttcatactgcgccagcttggccaaaatttcaggcttcttgttgcctgcgccgagttcttcttccatctctttcacaatggcaggaattcgctcatcaccagcatgtttattaaaagcttcaaacagatcaagctctgaattttcttcaatttcaacgcccagattgtaaagctgtttgatcggggcattgcatgcgaggaaattcatcggtcttggtccaaagctgataatcttcagattctgaagtccgatgactgctcttgcgattggcataaattcatggatcatatcggcacattcatcagcatcacccacaggatactcaggaatataagccttaatattgcgcagctgcagattgtagctggcatttaacataccacagtatgcatcacctctgccgtctaacaggttgtctccgctctcttctgcagcggcaataaacatcttcggtccgtcaaaatgctttgcaagcagtgtctctgaaatctcaggaccaaagttgccgagataaacacaaagggcgttgcatcctgcttttttgatatcttccagtgcctgcaccatatggatctcgctctctacaatacagaccggacattcatagattccctctgtcccatacttctctgtataagccttcatcagattctgtcttctgctgacagaaagactttcagggaaacaatcacggctgacagccacaacacctaacttcacttccggcatattgctcataataaaaatcctccttttattcgccgaatacagccttgtaatctgcctggaatttagcaataccctgatctgtcagcggatgatgtgtcatctgctcgattaccttgtaaggaactgttgcgatatgcgcacctgccagtgcacaatctgttacgtgcattggatgtctgatagatgcagcgatgatctctgtttcgaggccatagttgtcaaaaattgttacgatatcttcgatcaggctgatacctgctgtgctgatatcatccagtctgccgaggaatggagatacatatgtagcacctgctcttgcagccagtaaagcctggttagctgtgaagatcagtgtaacgtttgtcttgatgccttctgcagacagaaccttaacagcctttaaaccttcaactgtcataggaatcttaacaaccatgtttggatggatagctgcgatttcacggccctctttgatcatgccttctgcatcaacagttgtagcctttacttcgccgctgattggtccgtcaacgatcgttgtgatctctttgatgacttccttgaaatctctgccttctttagcaatcagggatgggttcgttgtaacgccgcagataacgcccatgtcatttgcttttctgatatcttctacattcgctgtgtcaatgaaaaatttcataattttacctcctggggtctttcgcccttaattatatgataatttgtaactgttcagagccaagcataatttcaaaaaacaggtataaaatgcttgcatttttaagttacgataattgctacctcgtttaacggaaatctatttacccggctgaccatagtacgcattggcaccatgttttctgaaataatgcttatcctgaagttcctgcggtgcaggctgaaccttcggattgatcagctcacatcgggctgccatcttggcaacttcttccagaacaacggcattgtgtacagcctcatgggcatccttgccccatgtgaacggtccgtgattcttgcagagaacggcaggtgttgcaatataatccagacctggacggtcaaattcatccgcgatcaggacacctgtattcttctcataagcttcattgatttctttctctgtaagatttctcacacaaggtacctcgccgtacagataatcggcatgggttgtcccgtagcatggaataccacggccggcctgtgcccagcttgtggcccatggtgaatgagtatgtacgataccgccgatcttcggaaaacggttatataagacaacatgtgtctctgtatcagaagacggattgtaatcgccctctactttattgccattcagatctacaacaaccatatcttccggtctcagtttgtcataatccacaccgctcggcttgatgacaaaaagtcccttctcacggtcaatcccgctgacattgccccatgtaaaagtcacaagctgatacttcggaagcagcatattggcttcgtagacttctttctttaattcttcaagcattcgactaacaccctcttttctgccataaaggctttttaaacttcccgcatcaacattctcttgtgaatcccgatgccaaatgacacgtttattttatcacttctgatgctgtcttttcaactgctattgcacctttgtaattctcaataaacttctcaaaaccttcgatatcctttgcatccggttcttcacttgtacctgcatttccggcaaatactttgccctccagataattctgaagtgtttcgtcttcacccttccatgtcagataagatgccagcagtgccataccccatggaccgccctcgccggctgtctccataacggataccggtgtatcaatggcagctgccagaagcttttgtcccacaccttttgtggtaaaataaccaccgtgaccgtaaatcttatcaatggccacatgctctttcttgatcagaatatccatacctactttcagggcacccagggcactgctcaaatgcagacgcataaagttagcaagactgaatcggctggttggttttctcacaaagagtggacggccctctgtgatgtcggtaatattttcccctgaatagtaaccgtaagacatcatatcaccacagtctgcatcaccctccatggccactttgaataatttctcaaagaggtcattctgactgatatccatgccgaacagctccgcaaattctctgaaaaggcctacccaggcattgatctcggatgtacagttattggcatgcaccatagctaccggactgcccacaggtgttgtcaccatatcgatctccggataaacggcctttaactggtcttccagaaccaccatggcaaaaacagatgtaccggcagaaacattacctgtacgaacaccaatgctgttggtagctgccatacctgtacctgcatcaccctccggcggacacagtgggatacctgcctgcaatttgccgctttcatccagaagcttggctccctcttctgtcagcacaccggcagattctccagccacaaggattttcggaagaatacctgttaatgtccatggataatgtttatcttcaataagcttgccaaacttctcaaccattgtttcatcatactgatgggtcttgtcattgattggaaacataccggaagcatcgccgatgccaaggactttccgccctgtcagctgccagtggatgtagcccgccagcgttgtcagataactgatctgattgacatgttcctccccatttaaaatcgcctgatataaatgggaaatgctccatctctgaggaatattgtaattaaataattctgtcagtgcttcagccgcctgacctgtcgtgctgtttcgccatgtacggaacggtacaagcagctcgcccttctcatcaaaggccatatagccatgcatcatggcactgaaaccgatgctgccgatcctggtcagctctgcaccgtatttttctttcacatctgctaccaggctcttgtagcagtctcttaaacccttccagatatcatccagggaatatgtccagaaaccgtcgatcagctgattctcccagctgtaactgccggaagcgattggtttgaatgattcatcgatgagcactgccttgattctggttgaaccgaattcaatacccagtgctgttttgccgctctcaataattgcttttaaatctgccattctatcctcctgattcatggattcgctgtcgaatcctgctttgaaatggacactctgtccaattcaaacattgtctatctctataaccacaggcaggcagctgcctgcggtttataccacactatcgcagctgcctgtcttttaatcaatttaacgatagtaaatggaattccatttcagctcattgttaaactgtctgattgttgtgtctttgtcgatataaacagcttcaatgcccatgctgtttgcccagtcacccatctgctcagccgtcaggtcataggagaaagctgtatgatgtgcaccgcctgccaggatccatgcttcagcacctgtctgaagatttggttccggtgtccagaatgcagttgcaaccggaagcttcggcattggtttctctgtcttcttgcagtttacgtcattgatgatcagacggaaacgattgcccagatcgataagggatgtggcaatagccttgccctctttagctgtaaatacaagtcttgcaggatcttctctgtcgcccatagataacggctgctctttgatagaaatagggccatctgcaattgtcgggcaaacttccaacatatgggactgaaggataccttctttgcccggtacaagattgtatgtataatcttccataaaggatgtacctttggcacccttcatgccctctgtcatgatcttcatcagacgcaccatggctgctgtcttccagtcgccttccgcaccgaaaccatagccttttgccatcagtctctggatagccagacccggaagctgctgcagggcacctaagtcaccaaagtgcgtaacaatagcctgataattcttttcctcaaggaaacgttcaaaaccgatttcaataccggcctgaacagccacatgctggcggaattccttctcatctctgccttcaagtaaaatattatatgtgctgtagtattcttctaccagtgcatcaatatctgcctttgaaacagctttcactgcttctgcgatttcatttaccggataagcatccacttcccaaccgaatttgatctgcgcttcaaccttatcgccctctgtaaccgcaacatttctcatattgtcagcgatacgcatcacacggatatgactgctctcaagaacacctacggctgtacgcatccaggaaccgattctgtcctgtgtggctttgtcttcccagtagcccatgatcaccttacgttccatatggagacgggaaaaaatatgaccgtattctctgtcaccgtgagctgcctgattctcattcataaaatccatatcaatggtatcatatgggatttcacgattatactgtgtatgcagatgaagcaaaggttttctcagttcctgaaggccgaggatccaggattttgccggtgaaaaagtatgcatccatgtgataatgccggcacaattatcatccatattggcctcattcattgttttacggattaattcattggtgatcagggttggtttccatacaacctcatatggaagattgcctgatgcattgagtttttctacgatttctttggaatgtgctgccacatgggacaggcactcatcaccgtacaggtcctgtgaacctgtacaaaaccagaactgataatttttcacctttaacatgtttttaattcctttctgtgtatgttcaagttgagtatatgcgaaacttggcacggaattcaggtctgccgtgcagacatatttcttacctgaatttctgcgcatgcttaagtcaatgttaagcgtttttcttcttcatgcgggtaaaaattgcctgtaatacgatgaagaagcaaagcagtgcggaaagtacgatacgtacccaccagctggacaatgtaccctgtgtggtgatcaagcttgtgatggtacctttgatcagaacaccgaagatggtgccgaatggtgtacccacaccaccgcttaacagtgtaccgccgataacggatgcagaaatggcatccatttcaagacctttggcctgttctacgaaacctgcacagctgtttaagcagaataagaaaccgccgcagcctgcaagcagaccttcaagcacataagctttaaatttgattctcttaacattcagacccatcattaacgcgctctgtgcattgccgcccacagcgtaaacttcacggccgaatttggtatatttcataacaactgcgataatcgctacgataatcagagcaatgataactgtcggataaatatatgccggatggaacttaccgctcttgctgtaggaaccaataaacggcagataaatctttgcattggcccatgcaaggaatgtttcattcttgatagaaatcatctctgtgctgaccatggaagtcataccacggccaaagaacagacctgccaggctgacaatgaatggctggatctccagataagaaatcaggaagccctgtacaataccgaaagccagaccgataaccagtgcaacagcaatcgctgcataagcactcatgccgtgattctccatctgattggccataaccatacaaactaacgctgtaatagaaccaacagagatatcaataccgcctgtgatcataacgatggtctgaccaactgcaataaccagcagaccggcattggaaatgaacaggttcagaaacatctgtggttttgcaaaacccttatctgcgaaaataaccatacctgcgatatacatgatcgcaaaaagtgcaattgtgataatcaaaaggaaggtattgccgttaatctttctgtttgaatctgtggttgtttttaacttagccatgattatttacctccctctactgctgctgcagctttttttgcacgctgttttgcaatgaaactctggaatacagggctctgcagtgtaacaataataacgacaacgatggccttgtaaaccggcagctgatcggctttaacattcatcgcataaagcgttgttgtcagagcctggatcgtataagcaccgataacggagcccatcagactgaacttaccgccgcccagtacattgccgccaagagcaactgcaaggatggcatccatttcaaggttcaagccaatgttgttgacatcggctgaataaatacggctggatgcgataacacctgcgatacctgccaacacaccacagatcacgtatgtcaggaatttgatcagtgttgaattcagaccaaccagtctggaagccgtaccattgataccaacactttcaatatacagaccaagggctgttttcttcaggatcagattcacaatgataacaacgataatcgccaggaaaatcggtgtcggtacaggaatcttgccgatataaccaccaaataccttataagaatccacacggacatatgtaatctgacctgctgtgatcagctgtccgataccacgtcctgctgtatacagaatcagtgtggcaaccatcggctgaatattcatcttggctacaaggaaaccattaaaggcaccgcagagtgcagaagccagaatagctgcaataattgccagacccatcggagcagccagctcagtaacagatacttcaccaccggaaaggatctgacagcagacagctgctgcaacagccataactgcaccaacactgatatcctgaccgccggaagcagccgtaaccagtgtcataccgacagccagaataaccagctcggatgcacggttgacaacgtccacaatgtaaccatataaaacaccattattaatggaaatcttgaagaatcccggtgtcgtaatcaaattcactaataaaacagcaaccagacatacgattggcaaaaacaagcgcatggatgttattttcttaatcgaatccttattcattgctgtcacctcctgctattgctttcataacaccttcctgtgtcagctggtcgccggaaatctcgccgaccttcttgccgtctcggagaacacccatacgtgaacatgtacgaagcatttcctcaacttcggaagaaataaatgtaacggccatgccctggtcggccaggtcaagcaccagtttctggatctcagtctttgtaccgatatcgatacctcgtgtcggctcatccagaatcagataatccggattggtcagaagccatctgccgataatcaccttctgctggttaccaccggaaagactcttgatcggtgtctctctgctggctgtcttaatctgcagcatatcgatatatttgtctgcggcttcctccatctcttttctgctcatcggatggaacatgcctctcttcgcctgaagtgcgataatgatgttctcacgtacagacagatcagcaaggataccatctttctttctgtcctcaggcagataagccataccctgtttcatggcatccagcggagaattgatcttcacttccttgccgttgaccttgatcttacctgtatccggcttgtccgcaccgtaaatggcacgcaccagttcggaacgtccggaacccagaagtcctgtcaggcccacaacctcacctttgttgacagcaaaatcaaacggtttgatactgccttttcttccaacctgttcagcttcgataaccggttcaaacttctcaagtactttatgatctcccttgatatctgccagatcatcaaagttcttgcccatcatcttggcaaccagttctactctaggcagttcctttacaggatactctccaaccagtgtaccatttcgaagaacagtaatccggtcacagaccgcatatacctgctcaaggaaatgcgtaacaaagataataccaacgccttctttttgaagacgtctcatcaatacgaaaagtttctcaacttcttcatcatccagagaagatgtcggttcatccagaatcagaacctggcacttcatatctaccgctctggcaatggcaatcatctgctgcttcgccagagaacattcctctaatttatcagttgctcttgcatcaatatccagactcttcaagagctctgttgctttcttattcattgtatgccagtcaataagaccaaactttctcggctcacgtccgataaaaaggttctccgccactgacagattcggacaaagattaacttcctgatacacggtactgataccgtggctctgggcatcctgcggggatttattgataatcggtgcatcagaacccgctattctgatctcaccgccgtctaaactatgtactccggtaagcaccttgatcagtgtggacttgccggctccgttctctcccattaacgcatggatttcacctttgcgaagcgtaaaatctacatgctgcaatgctttgacacccggaaatgttttcgagatatctctcatacttaaaacaacatcattggacatatagcattcacctgctttcaaattctctctctaaaatctctcccatttcgggtaagttgacatgtaacgtataagcacaaaattggcgtggcaccattctaggcttctgcctctttctaccacgccaatcattatgttcccggaaaattaattcctataaattttagtatgcacgagcgtctacaacgtcctgtgttacttctgtaacttcataatctgtaccgtcgattgaaacggatgctacatcagaaccatgagcgtagataccttcttctacatatgcctgtttctctggtgtttcgccagcctgaagctgtttgataatctgttctacacgtgggccatgaagaggattacactctgtgttaacaatgatatcacctgataatgtatctgtaataccctgttttgttgtatcgaaggacattacaagaatgtcaccgtcaggaccaactgtcttaccagctgctttgatagcttcgattgcaccaaatgcttcattatcgttctcgcagtatacaacgttgatgttgtcatactgtttcagcatagattccataacttcctggcctttagcctgtgtgaattcacctgtctgctgagctaacagattccagccattagcttctactgcttcgttgagggcttctgtacgtccgatctgagcggatgcgccgattgtaccctggatatctacgatgttaacttcactcatgttcttagctgctgcgtactgttttaaccattcgcaagctttctgaccttccagtttgaagtttgaaccaacccaagctgtgtaaaggctgtcatcagaaacgtttaccatacggtcaacgatgataaccgggatttctgcatctttagcttcctgaagaactgtatcccaaccggattctgttacaggtgcaagaacaatgtaatcaacttcctgctggatgaagttacggattgctgcgatctgattctcctgtttctgctgagcatcatcgaaaattaagttgtaaccgttttctgtgctgaatgtagatttcatagattctgagttagctgtacgccagtcagattctgcaccaacctgtgaaaaaccaactgtgatcacgtcacctgtgttacctgctgcttctgtttcaccagatgctgcttcgcttgcagcttctgtttcgctgcctgcaggtgctgctgtttctttagcacctgatgagccacagcctgctaatactgcagcaaccatagctactgacaataatacccctaaaaatctcttcttcataaactcttctcctcctagttatgaaacaataagtatcttatatgaaaagcataccttattcccataattttggaaacagaggattcttttttttaggttaatattttttgaactttttgtgaatattttgacccattcaaaaaaagtgtacttttttatgataaaagtatatttttttatgaaacatttctggttggtatcacaatccttgctgtggtgcccacatccggttgacttttgaaaaataaaccataattttcaccataataaatatgaatccgctcattgacgttgcccacaccaaaggccgctatattggccgactgggtacttccgtccacggaagccttcctgagattatacagtttttcttcatccatgcctacaccgtcatccgtcacacagaagacaatattatccccttccaggcgaccggtcacagaaatcgttcctttcccccgcttgccgcggatcccgtgaaccagggcattctcaactaacggctgaagaagcagcttcgggattgtaaaattatataacgccttgtctatatcaatgttgtaagccagcgtatcctggtaacgaaactgctggatcttcagataactttcaatatgccgctgttcctcctggattgtaataaaactctgcccattgctcaaagatgtccggaagaaatcagacagataagtcagaagtcggattacctgatcgttctgcttcgcctccgccagccatacagctgtatccaacgtattgtacaggaaatgcgggttgatctgcgcctgcagaagcttcgtctcgctcagccgcagtgtctcatggttgcgcttcatatcttccaccagctgaccgatctccttggtcatatcgttgaaattatccataagcagcgcaatttcatcccctgactccacatccttcgtctgtgccgtaaaatcaccgccggctactttgcaggttaacatgcaaagattgcgtatcggaccggtaatatttcgagccgccctgacagaaagtcctaccgtcagaataacaacaagaagcgacgccagaatcgtaaaacagaaaattgtccgattattctcatccagctgtgctttgatctgatcgaaattcagcgtttctgcataaatatagtcacggatacatgactgcaccagagatgtcagtgcataaacatcattatccagtgtggccatattctgatcataggaattctcccggccaatattgttctccagctcatgaatacaatttgacagtgtattcaatgtattcttcaggcgaaccatctgacttctgttcagttcaaccgttgcagaatgcgccagatcattgcagacgcttttcagttcatcgatataggcatagggatccaccgtcaaaataccattaaccgtcacggtccccacatccagctcatcaatcttcttgttgttgatgaccgccaggtaagtggtgtagtcaatccgttccttgaaatcccggacatattcattggcctttgccacattattggtgatgtccgcatacgcaccagtcgtataggaaattgtccaaagcagataacagacaagacagatcatcggtacaatagccgccgcagtgatcatcataatcttgcggttcagggaaagcttcttatatctaaacatcctttacccctttcttgctgccctgtattctttcggcgtgcagccctgggtcttcttgaaaatatagctgaaataatgcgggtctttgtagcccacttcatagctgatctccgatgttttcatagatgaacaggccagatactgtttcgccttctccatgcggacttccgtcagatactcaatgaatgttttgcccatttccttactgaaaacggaactgaaatagcttggactcatacagacttccgccgcaacggaattcaacgaaatgtcttccgacatataatcctgttcaatccgctccttcgctgtctggataatgtccgaataccgtcttccgctgaccgtattgcgcagttcaatggcatgatccagcagcgtcccgatgtaatctttaatgtcatctactgactctgctgttgtcacggccagcttcaggattttctcattctcccggataccttcccactgaccatacacttcaccttcaactccggcatctttcctcagcttcttgcagaaagtcagaaccgttgcataaatgtccatgataatatattgcctgatcatcagcgatcggaaatgatcctctgatatttccgtaaataatgccccgacaaaactctccacttcctccagagaaccattgcttaggaaacgggtaataatttgattaaactggttgatctcaccaaaaatattggcatcaaattcattgtcctgctgttcaaagttcagttgttcaaccgatatgatctgattcggttcctgcacaaaacggccggcaaatgccttatccgcctcccggaatgaatatcgcagttcacggattcgcgccacctcactaccgataccgccaaaccaggtcaatgtgtcaaaaggtgcgatcactgctttcagcccctcaataaaggcttttgtctgagtctccatgtcttcttccacagatgtcagaagaaatgcccaaccttcaactcctctctggaatcgaaaaacatccctgaatcggtcaacatagccgccgacagcctcataggcttcggccagtgcctcagactgctctgcctgcacatgatcctcctggataaatttgaacaaaataatcctgtaaaaagggccgctaagattcatatggaaacgcttccctttttccatggcatctgccagcgacaatttacccgatatcaattcccccaggaatttcatcttgatcagttcttcattctcctgcatttcctggtaataaactttcttcaaggccagatcttcccgctcatctctgactttctcggcaatctccgacaaatgttccagcaaaactgctgaggataccggtttcagcaggtattccgctacaccgatcttaatggcctgcttggcatactcaaaatcatcataaccgctcaatatcacaatcttgatatccggcagttccgctttaaccatacggcttaactccagtccatccataaacggcatacggatatccgtaatcagaatatccggcttctccttcaaaatcaccggcaatgccagttcaccatcactggcatcaccgacaaattcatacccctctttttcccagtcgatactgttcttgatactctggcgtataataatctcatcctcgaccaagtatacttttaccattgtttaatccttcttctccatttttgcatttcccgtttttctgacggacgccaacgctgcgatcaaagcatgaatatccagcggcttagccagatggcctgtcattcctgccgcaagacacttgtccatatccgttttggcaacattcgctgtcatggctatgatcggtatcgtattcccatggtactgatccattttgcggagcatctttgtcgcttccagaccattcatcaccggcatctgcatatccatcagaatcgcatcataagtgccttccggtgcctccataaatctttcaacacagatctttccattttccgcctgctcgcttgtaataccatgcattgccagaatctcatgagcaacttcatagttcagttcattatcctcggcaatcagaacatgcatcccctcacagtctgtcaggtcagattctgtcgatgactgaccagccatttcaagatcagattccatcggagactgaaggatcatgtcggaatctgcttcttcaaaaggaaaatcaaagacgactctgaatgttgtaccaacacctacagcactttgtacttcgatcctgccgttcatccgatccaccagttccttgacaatcgccaatcccaaaccgctgccgcggactttattgattcttgtatccacagatctcgaaaaacgttcatacattttcttcatatagtcttctgtcataccaattccgttgtcctgtacaattgacacaagacgtacacatcccggactgtctgatgtttcttcatataattcaaaatggaccatgccgccttccggtgtatatttgacagcgttggataccagattcacatagatctgtttcagacgaatagcatctgcatcaatctgaggatgcaatatatcatgcgcccgacaggtcatatgcagctttcggtctgctgtcatctggcccattatatcctggaaatcacggaaaaacgtcatcacattaaaaaatgcaggctcaatatgaaaatgtccgctctcgatctggctgatatccgtaacatcatccaccaaccgctgaatataacgtcctgcagactgcagcttgtccaggttctcactgacaatagacttctcgtcaatatgcgctttggcaatataggcaaatccaagaactgcgttaaggggtgtccgaatatcatgggccattcttgaaagaaagtctgttttagcttcattctcccggttggctgcctctgccgccataaaccagttgcgctcacgcagcataacgtcgctgacttcacgggtcacatacaaaacctttgtcacgactccctgctcattcctgtttttagcaatgaaacgtgccagttgccagttgccgtccggaaccatatattccaatgtaactgtatctgtgttcttcagacgttcctgcaatgtcgaaagatcaaagaaacgcataatccggtcctgataatctctggcaacaactgccttacagatttcaaccatcttctcagaagctttgccggatacacctgtcatcttgtgagcttcattgatactgacaacttcatcatacacatccttctcaaggtcaattctgtaaatcgaaaaataaatcttactgatggcggagataatctcattattgatcctggtctcattcaatgcctctctgagcactctctgcttctcccgatcctccctgacaatgtcatcaataaaacgaaaaccgatcaacaccttgaaattctcttcatcgatgcccattctggtgatctgtgcctcaaaatattcatggcctgcaccattcggaagactctggaaacgaaaggaaatcctgtcacgcgacttcagttctcgcatcagtctctcagcattcagccttttcttcaacttccgggcttcttcctgcatcataaactgacgacaatagctctctataatctctttataagaaagtgtcatatattcttccgacgccgacacctgcagaacatttgcctccggatcaaccttgagaatctcaagataatcctttttcaaatctgcaaaaaaaacggatatgtaatcctggcaaagaacctgaagaaatcgctgttccctctgaaatgcgtcaatactggcctgcagtgcattctgcttctcatccagcaaattcgacttatggcagctgtcataagcactgcctaaatggcttcccaccactgtcagcagattgatcagagactgtgattcatccaaaatcggatcgtccagtccgataaacccccacaatgtgtctgtatgaaacatcggaaaaacaatcactgtatgaatatcctgagccttaagcagacgatattccagcggcatctcatcctttgccgcctctatatcttcaattaccactttctctccacgcagaaactgtctgtgccaatatggcatctccataaacggaacagcctgaagattgtccatctggggtttgacgccttccgcgcaccactcactggtgttgcggtaaatactctgtttttctataaattcaaaagtataggcacgtccggctttcgtatattctcctatgtattcaagaatgccttgtatcgcccggttcaactcttccattgttcgcgaacggtcgatggtcaccatctggttcaatacgatttccagaccgcttaaatggcttgatgccttttgctgtttcactacgctgtctgattttctcattggctgttcaccttcctgatcacttttctgatttatttatttctagcttaccatataacatccaaccttgcaatcaacatagaataattcgctgactccgcatctttctgccggttaaaatatatctgaaatatatccaaaaccgtcttgcatctttacgctaccatagtaaaattttacagttttttcttttttcacaaaaatacattgaatttccttttcccctatgctaatatttatttcattgtattactgaattaatactcaggagagtctcttcacaatgcatcatgcaaaatacaaaggaagagcgccgaaggtgtacacagttgcggtgtttttgattgaatacgcccaactgcaaatctctcaggcaaaaggatggaggaaaaagaatgtttacacaaatcaacaatctcatcaactggttggacgcggtcgtatggggactgcctctgatcatcttaatcctgttcacaggatgtctcttaacaatccgcttaggtgttcttcaaatcaggcatctcagcaaagcactcaagttcatgattaaaaatgaagacggcggcgaaggtgaagtatccagtttcggagctttatgtacagccctttccgcaaccatcggtacaggcaatatcgtcggtgttgcaactgccattgctgccggcggccccggcgctcttttctggatggtcatcgctgcttttctcggtatggcgactaaatatgccgaaggtctgttagcaatcaaataccgtacaatcgataacgaaggccatgttctcggcggtcctttctactatattgaaaacgggatgggacacggatggcgttggcttgccaaaatttttgccttcttcggtgccggtgttggtctgttcggtatcggtacctttacacaggtcaatggtatcgcttccgcagtgaaaaatttctttgatccgaatatggcacacaccgtcacactgttcggcaatacctactcatgggcaaccgttatcgcctgtcttgtgctgacattatgtgtcggtctggttgttctcggcggcatccagcgaatttccaaagttgctcagattgttgtgccttttatggcagttctttatgtagctctggcattgatcatcctgatcaccaacatcacagctgttccggctgccatcgtaaccatcgtgaaatctgcttttacaggcagtgctttggccggcggcgctatgggtactatgatcatggctatgcagaaaggtatccagcgaggtatcttctccaacgaatccggtctcggaagcgcacctatcgctgctgccgccgctcagacaaaagagcctgtccgtcagggtcttgtctctatgacaggtacatttatcgatacaatcgttatctgctccatgacaggtctttctatcgttattaccggaacatggaatacaggccttgaaggtgttgccatcactacaactgctttccagcagggtcttccgttccctccggttgtggcatctttctcactgatgctctgccttgtattcttcgcatttacaaccatcctcggctgggattactatggcgaacgctgtctggaatatcttctgaacagaaaccagacagctgtcaaaacctaccgttggctgtacattatctgcgttttcatcggcccttatatgaccgttgctgccgtatggaacattgccgatatctttaatgcacttatggcattcccgaacttaatcgcactgctggcattgaatggcgtagtaagaaacgaaacaaaggattactttaaacggcatccggagttataaagggcaaaactttcccaaatctcaataaactgtaaagaatgaacgaattcatagcagacacgttcattctttacagttttctttagttttgattccgtcattaaatcagccttctatataaaaaatctataggatagatataaaaacaatatttttcatatagttcatttcatgttatactacatcaagaaaaatttgtaaacaaggaatgattttttatgaaacgcattgattttgaaaatggcaatatcgtcagcaacattctgaaagccgctctgccgatgcttgtagcccagatcatgagtcttctctacaatatcgttgaccgtgtctatattgcccgtatccctgacgttggcaccacggctctcggcgctgttggactctgtttcccgatcatcgtcattatcacagccttcagcaacctgttcggcaccggcggtgcgccgatcttctccattgaacgcggcaaaggcaatcatgcgaaagccggacttctgatgaatacatcctttaccctgctggcattatgcgcggttatcctgatgatcgcaggactgctctttgccagaccgattctggtactttttggtgcttctgatgccgggttggcctatgcatacccctacctgatgatctatctgctcggtacatttccatccatggctgccaccggcatgaatcctttcattaatgcccagggctatgcaacaaccggcatgatctccgttatcatcggcgctatcaccaaccttctgctggatccgctgtttatctttgtattcggactcggcatcaaaggcgccgccattgccacggttatttcgcagacattgtctgctgcctttgtattgtactttttacactacaaagcagaatatcgaatccgttttctttccaaaaccgaactggcatcctgcggtgaagatgccaaaaatatcgtcagcctcggaactgccggatttattatgcagctgaccaacagtcttgtcactatctgcgccaacaatgtcctgtccgttacaggcggtgatgtctacatatccgttatgaccatcatctccagtgtccgtcagatggtcgaaacgccgatttacgccatcacagaaggttcctcgccgatcatcagctacaattacggtgccagacgcccccaaaaagtacgccaggccggtatcaccatggctgttttagcgctgatctatacgctgctcatctggagcgtgattctggctgcacctcgcttcctgatcggtattttcagctcggatcaggccctgatgaccgataccgtccccgccatgaaactttattttgctgcatttatcttcatgctgctgcaatatgtgggccaaacaattttcaaagccctcaacaagaagaaatatgccatctttttctccatactgcgtaaagtcatcattgtggtgcccctgacttatatcctgccttatgccctgaacattggcccaaacggcgtttttatggccgaacccgtctccaatgttatcggcggcagtctttgcttcatcgtaatgctctccacagttctccctgaactgaaacggatgtaacagacaaaaggtatccgcatttatcaacacggataccttttatacacaatatacttattcagttcttctatttgctgttaaatacatcccgattcagtgcaccgtcctgattcgccacaatgaccgtacacattgcatcacccgtaatattaaccattgttctggtcatatccaggattcggtcaatacccatgatcatggcaatggcctctacaggaagcccaacagaagcaaataccatagacaatgtaatcaaaccaacagaaggcacacctgctgtaccaatggaagctaatgttgccgttgcgataacagtcagataatccgtcggtgtcaaagtaatgccaaatgcctgggcagcaaagcagacggcaacaccctgcatgattgctgtaccatccatattgatcgttgctcccaacggaatcgtaaatgaagaaatcttcttggatacaccaattttttcatccagggtctcaattgccatcggaatcgtagcattagatgttgctgttgaaaaagcaaaactcataacagggaaatacttacggataaatctgtacggattcagtcttgtaaagattgccatcaatgcagaataactgccaaggcaatgaatcgccagtgctccaagtacacagagcatatattttgccatcggaataaatcccgaaaaaccgatattggaaaatgttctggcaatcaggcagtacacgccaatcggcgctgccatcatgaccatattggtcatctccatcataatatcattgaactgtgcaaaaaagttagaaacaacttccactctttctcccagttttgcaagaataataccgacaaaaagtgcaaatacgatcacctgaagcatggtaccattcgccaatgctccaatgggattagtcggaatgatgtttaataacgtctctgtcagagtcgtactctcagctacagtgacatcctgtgtctgaatcgcagctgtatcaagtccaagtcccggtttgacaatcgttcccaccgcaagggcgatcgaaatcgccagagccgttgtaaaaagatagaatacaatggtcttcacaccgactttgccaagggtcttcgtatcaccaatagccgcactaccacaaatcagggagcagaatacaagcggcacaaccagcatctgcatgagtcttaaaaagccctgtccgacaacataaaatacaccatccaccaacacggtatctctcatgtatccgcccggaacaaagtaatacagaataataccggtaaatgcaccaaggaataaaccgataaaaatcagtgtggtcattcccaacttctttttgcttttttcttttgccattttcctaccccctcaattcctgaatataatcccgcatcgcatctttccagtcaggcatctggtaaattccggttaccttcatcatcagattctgaagatctgtccttctcgggctgttcttgcctgcttcggcagatatttcctcaattctgcctgtcggatcctgccccatgcatcgaaggatctcttctgctgcttctacacggctgcagcacccctcacaggaagcatgataaataccatattcattggcatcaatcatcttcataacaaaatcagcaagcactttggcacttgtcggactgctgtactgttctgctgccacctgaatgacaccgccttcttttgcctgacgaatcacagaatttacaaaacaactgccctctttggcataaacccatgaactacgaacaatcagatgcttcgggttcaattcacgcacaaaattttctcccgccagcttggatttaccaaaaattgtatccggagttgctgtatcaaattcattcagtggttcattcccctgtccgtcaaatacgtcatctgttgacatgtgaatgagttttgcgcccactttacgggatgcagaagcaacatttctcgcaccaatagcattgactctaaacgccttcaccatatcctcttccagccagttatgggtattataacctgcgcaattaatgacgactgccggatggctcatgtccataaatgccgtcacactatccatgtcggtaatatccacatccatatccgatgtcagtacattgtatgccatacggtcaagggcatcactaatggtactgccaagtcttcctttggcaccaatgatccagacttttgttttactcatattgttcctccttgttggcctaaaaaaacagggcttgtcgccctgtttcacaactcactttgttctagtatagcatatattatttgcagcagacaagatttcagacaaaaaaatttgattatgtctatgatttatcctgcccatcttatacattgtcgaattccagtacatcgtttcgtaaataactataccaatcgcgtaggatgcgaatggtgtagttatttcgaaaacgatgtactagcttctgtaagtatccagaaattcctgatacatactctgtccttcagccttctgtctgtgataaataccattcagtgaataggacaccagttcatctcccacatactccagccgcagtgaaaagaatggtgcatcatgctgcatcagccagaaaaagatcttatctccctcccagactttcagattaaatacttctttcttgtccagccactccagattgccttcattgcactcaatcatctcaccttcccagtcatccgctgtataaaggtgcataaattctgtctcataacggtctgtcacaaaagtgatgatgccccggaacttccatgacgtcaaagtcagtccggtttcttcacgtacttcccgaaacagacaatcctccggactttccttgtcctcaaacttgccgccaacaccgatccacttatccttgttgatatcatgctcttttttgacacgatgcaacatcagatactgatcacccttttctatataacataatgttgttaaaagcatacgtttcataatttatatccattcccttcagtcattcataaaccttatcatacacctgttaaaccaaaaagtgtacttccaaaagaaagaaaagaacgctttctttcatattcataccaaccttcttcagcagctctacgatctgttcatcaatatcgctttttgatgcgttggtataaagggacatcggttcacggataatctcctccacattgtgatgcggatccagagctgaatacggatcctggaaaataatctgcatgcgcttatgataaggctgcagtttggcgccttcaagctttgtgatatcttcgccgtcaaaaataatctgtccgcctgtcggctcatacatacggatcagtgttctgcccagcgtcgatttaccgcagccggattctcacttctattttagcaatttcctactatttcgatcagcttttattttaatcaaccttaacctgatcgatcataatgttcaggatctgcttgtctgtatctttcataccgacacggccaatatagcccatactcttgatagtaccttccacatccttctgaacaatgccttccccaggctggaaccagtgatgctttcttccgagaaaatgccccaggatcgccgcatctaccgcagatgcgatctttgccgcacaagaagatttcgctccatcacagacaataccgccgacattaccaatcgtattcacaatcgttgcggaaatgtcctcataactgccgccgtaaagataagtgatggcggcaccgcttccgcatgctgcactgacagcgccgcagtatgcggacaggctgccgatatacttcttctgatggattgccaccagattgctcacaaccaacgcacgatacagctgttcttctgtacagaataaagacttggcaaattcaataaccggcaaagacaccgtcattccctgattgccgctgccggaattaataacgacaggcagggaacagccgcccattcgtgcatcggaaccggctgctgctcttgccttcgcacgaatcttcacatcatctccatatacctgcagaagtgtacggccgatctgtgcaccgtaaggatgcatcagcccttcatccgcaatggccgagttcatatcgatctgtctctttaatacggctctgacatcatcgatatccactgtattggcaaactcaagaatatctttcacatttaataaagacttatccacataattgctggattcttcactgactgccgcttcaaaaagaatcgcatcatcctttacaatcttcgtaatatatgtatggcggttaataatggttacctccgcatagtggctgtctttacacactttagccacaatataaagattcgccacatcctcctgcagtgtgcatgtacaatatcctgccgccgccagttctcttgtcttctccacgtcctcaggcttcacggattccagcacttccagctctctggatgcatcgccgcctacgataccaagaatcgctgccacatcaatacctttctgcccgtcagaattcggtaccgtcacacccttgacattcttgataatattgccgctgcatcgcatttccacatgatccggaaattctcccagaatttctctggccttggctgcagcataggcaatggcaatgggttccgtacatcccaatgccggcaccagttcattctccagtatcttcacgtaattgtcatataatttcttatccaaaatcattttctccccatttgcattcatattattaatatataacattactgttttaaataatcaatagtccaatcatatctttctcaacaatatcccgacagacacaaaaaagccgtttctcacaaggagttctctcccaggaaacagctttttgtctcttcatttgtctgataaaggccctatctgcccatctgcagcaacagcagctggtaaccgacaccaagtccgatacagccaagaacagccgtcaatgtatacatccactgaacctttctgtcatcattatcatccagaataatacccatctcatcgctgtccttatcctgcacataatgcttaatattcacttctgtgcccttcggatacttcgcacgcatctcttcacgggtatcataagtctttcttgtgtaacaatacagacgctttccggccttctgttcacgatacatcagacgataacaccagacaagatcacaattcttgccttccttcggatgaacataaccatctacaactgcctttgtcttcttgccgcgaatgtaaggtgcccaaaaagtgtagcaaattacgcagacaatgatcaaaagcagaaaattcgatgtattgaatatcatagaaaacatttcctcttcccctttccaaaaatcgacataactgtattatatcgtttgataagtagaccgtcaacggataacgacattttttgacactttactttggcaattctttcggtaattcctcttccagaagaacggcttcttctgcttcttccgttgcctctgctgccaactctgcaggtgtctcatcctcaacaggactttcaccgacagcaatcaggattctcgcaagtacaagaggaataaatgccacatatgccccccgcacattcaatatatacacggaccatgcacccagacatgccccaccaaaaaacgacaatacagtaaatgaatagataatccccttcctaaggaattccttatcctttgtcagtatgtactgcgtccatccgagaagcgcctgcttatagttattcgttgtaaaaatagaggcgctgttaaatccgcctgccgcagagtatacaccccactgaaaggaagcacagaagaaaatcggataaaggcccaccaacaccggatccagcgggagcagtgacgccagtgttaatcctgctgcatctacccacaaggccagctttcgcatgttcaatttcgtataattagtcaaaagataagcggataccacaccgaaaccgaaaatgatgaatgcaatcaatcgaagcagcaccttcgaccattccatcgaaatcagatctgccgccatttccataatgttgcctgtctgtgccgagccgaagttgccggcatgcagcagaactgcataagttcccatgaaaccgcccaccaaagtcagcagccagtgcatcaaaacttcccattggttgtctgttaattttctcatttattgaaatgcctttcttattgcatactgcgaaactctattgtgtacggaacatcacaacttctgaaatttcacaatgaatgcttttgattactaaaaataataaaataccgctaattattttaagacaacactatccatttttcaagggggaagaatgactatttttgctcttattcaaaaaactgcttcaaactaagcctgtcctgacttaatttgaagcagttcattcaattcttgtaactgttcagagccaccctccaaaatgctacgcatttcgtcggtgtggcgtatccgccaaataaaatttcaaaaacagtcttaaaaatgcaagcattttatacctgttttatgaaattttgcttggctctgaacagttacaaattcttaacgtctgtctcttatgcctctatcacagttcccgtcatcagcggatgaatttcccgcaattcccgtgtcaggatttccagcgccttatcgccggtgcaatgtccggtgtaataaacagcatccggaagattcgctgccaaatccatgataaccggttcaggcagacattcgcctgttcttggactgtagaggtggaaaccgccaatcacgatatccggtgctgccggacattgtctgataatattcagcacacctttatgaccgcagcccataagaagcacattcttcctgccctgaataagcagatgctgttcatgcacaaagtcatctcttgtcttatcttctttcagcagatttttgttcgtctcatagatttcacctgtcacatggctgtaaatctgcagttcatcatcaatcacataactgccatccaacagtttcacctgcgggtgtgtcttcaatgcctgattcagaccgatatattccggcccggtctttttagctgtataatgatcattaaatgccttctcctgcaaataaatcacagcatggtcattgatcgccagaaaagcatccagcccgccgccatggtcattgtgcccgtgggaaataacaaccgtatccacctgagataaatctatccccaatgctttggcattcttaataaataaatctgttgttcccacatcaaatagcagcttgtgcttctctgtttccgcataaatactgagtccatgctctgccccaagctcacattttgtcgtatcctccaccaatgtaacaaatttcatgatcaatacccccattcattgcttacttatattctatcatactttgctcaaaatgtcatatgccatttatttttcaaagtaattttcctttgccaactgccctattctgttcgcagtgctgttaccgggtcgctctttgaagctttattggcaggaatcaggccgcccaaaagtgtcagaacaacgctcaatgcaattaagataaaggctgcgccaatcggaagtgccgcattcacatccgtattaccggatacagtgtgaataatatagttcatcgggaagatagcaataatcgtcagaccaataccgatcaggcccgccaacaggccgataataaaggtctctgcattaaacacagcacccacatttcctttgctggcaccaatggcacgaagaataccaatctctttccttcgttccagtacactgatataggtaataacaccaatcatgatggaggatacaacaagcgaaatggccacaaatgcaatcaggacataggaaatcatattcacaatggatgtgactgaagacatcatcatccctaccatatctgtataggaaatcactttgtcctcctgaccgctgttcttcatgtcatcgttgtaatcctcaataatctggtctaccacctgtttactgtcgaaatcaatcggataaatggaaatcgtctgcggatcattctcatcagcatatcccattttattcagattactttcataagaaaccgtgccggttgtcataagggatgtcatcaactcctgtagatcatcctccgacatattcacctgaattgcctttgcaaaggcatccggatcaatggaaaaaatatcctgcatattacccatgagggatgtcatggcatttcccatggatttctgaagatttgtaccaacctgctccatgacttttcccatagcactgctgatctgactggtcagttcattggtaaaaccacccatgacactggccatcttattctggagatttgcctgcagcgtctttgtatccacaatcttttccgcatactgtaagagcagcttctgtccggcatcggaagaaatatacttcagaaaagctgcctgaatcttatcaggctgtgccagattattggcttttgcatactcaccgtatccattggccagatcagtaagaatttcttttatctgatcatccgtaattgtgactccggacaatttatccttgattcccgcaagttcctccgacagaatacggctcacagcgtctgtttccagataagctctgaaattcgtgttaaaatcatccggattctcctgttttaaggcaaattcctgataatcttccatcacacggccaacaaaatccttcagcatatcttctgtgatcacaccttccagctgcggctgcaaaatatccttcaatttctgcgataaatactgaacagcttcatccgatgtcaggtactgtttcaggccatctgtcaatccggtaatatctgttgccggatcatcccccacagaatcctggtagccttttaataatgcgttaaaaagctctgccagggtatcctgcgtcaaattcacggacacaccattcataatatcctgaatatcattagtcgagaaagacggcattgcagcggataacgcattagcatcaatcaaatcactcatatccacatcactgaagtccatatccgaaaatgccgaagcatccatattcatcctggaggtatccaccttaaaagcatctttgaaggcttcctcattgattttgaacaggtcttccatattcaatccatcttcgtcatccgggtcatcaaaagatttgccgttaaagacattggtcttcttgtctttcagctgatccttcacaatatcactctgggctgcttcctggatcacatgattcaaaagagacgccggatagccgacacctgctgtcaatgtggtaatatcctgtccttcctttggctgaacaacgccgacaaccttcagttcttcaccgtttttcaccaaatctttgacatatttatcattatccgacttatctttccacacggaaaactcatcatcatacacataataatcactggcattgaccagtttcagggtcaccccgagaaaatcctcataatcataggtttccggatcctcattgacttccactgctttatcatcggaaactgcctcaagaatcttgtccagttcctccccggatttcagtcccagtgaatacagcgtcatatcataaatctgtccatcctgggtcagaataaccacacactcatgatcattctccggccaatggccggccttcacatcatactgatccttgtaaagggcatcattggccggcagcgcatgaaactgttcaaagccgctgctgcccatcatggccagcatcatggatgatgaaccggacagagaagtcagcgtctgatccgggcaaacctgacgcactttgccgttatcttcctgcagataaatctgcggcgtaatgccaaaatcatactcaatcgcttttgtctgattcttaatatcggactttccgctttcaaaataggttttcaaagacttcagatcgttatactctgttccggatacaagctgtgtcaggatctgcatttccttaactttgttatccgtactggtcggtttcttggacggcgtcatcatatccgcgctcaatgacatcatattcgttgtggtctttgtaatctgcaatgggtattccgacatggtcttttcctccatgtcctcaatgtatttgttcactccatgggacagggacaaaatcatggcaataccgataataccgatagatccggcaaaagataccaggatcgtcctggccttcttagtcttcagattattaaaactcagtgacaatgccgtcaggaaagacatcgatgacttacccatattcttatgcaccggcaccggcgcttcatcctccggaatctcataaggatcagaatcctccagaagctttccgtccttcaccttgacaattcgtgtcgcatactgataagccaattcagggttatgggtaaccataacaaccagtcgatccttggccacttctttcagcagatccatcacctgaatacttgtctcgctatccagggcacctgtcggttcatccgccagaagaatatccggattattcaccagggcgcgggccagagatacacgctgcatctgaccaccagacatctgattcggcttcttatggatctgatcccccaaacctacttcttccagcgccttaatggcacgctcccgacgttcctttcctgaaataccggaaatcgtcagggccagttccacattcgccaatactgtctgatgcggaatcagattataactctgaaacacaaaaccaacggtatggtttcgataagaatcccagtctctgtccttatatttcttcgtagaaataccgttaatgatcaaatcaccgctgtcataccggtccagaccaccgataatattcagcagcgtcgttttgcctgaaccactgggtcccagaatggccacaaactcattgtctctgagattcaggctcacatcatccagcgcccgctgaacaaggttgcctgtcttgtatgtcttgcttatatttttaatttgcagcatagtctctccttaaacaaagcataaactgaaggttacataatatttatctatcctacgccacattatactccataattatccctataggcaagttgaaaactgtttaaaaagaaactaacttgaaaaatattttattcctcctattgtgcaaccttttgcctggattttttatctaatagatgtaataacttaaagccggctttgaacagttacagaaataatgataaaatccatgataaggaagtgatgaaccattgacaaaagaagatttaggacacttaattattgcctcaactgatagtctttacagaatttcaaagtcaattctaagaaatgaaacagactgtgaagatgccgtttcggaggccattgtaaagagtttcgacaaaataaacactttacaacatgcatcctatgccaaaacatggctggttcgtattttaatcaatgaatgttaccgcatttaccgccaaaagcaatttgcgccgtcaaatgattttacattcaaagaaaacctatccgatgaagcggattattctgaattatatcatgcaatgatgcagttggacgataagtatagaatccctgtcgaattatattatattgagggctacaagatccatgaaattacagatattctcaaccgcagcgaaggcaccatcaaaagccaattggcccgcggcagacagcaattaagaaaatatcttgaatcggaggcagcacaatgaataacaatgattatttaaaaacacctgaacattttaagatgttagtagaatcaaaagtcaatgaacaattaaatactccaatatcagataagaaaaaaccgacaacatccatacaggcgaaaaaagaaaaatccggataccattttaaaaaaatcgcagctgcggctgctgtcatcgccattattaccacgacttcggtttttgcagctaaacatttccgacttagcgactattttgaaagcagcacagaaacatacaacgaaagctatatggaaaacattgataaccgcgacatatctgtcaaaaacggttttcctgaacaaatgaagcaatttgagcaaaatacaaataaagtttttgacgaaccactttttacattaacggaaacctattatgacggcaactacctctatatttatgcccaagcaacggatgccggacaggaatatgatgctattaccagtcgaatattcattaatggcactcaatatatcggtgatttcgggcggcttctcggtcaaaccgaaacgaacggtttcaatcaggatgagtatgtcggaacatttgcacttgatggattagaatcagataattttactgtagaaatgccattaagcatttatctggcatcagaagaaacttctgtcacagaaacctctgctgtggtcgaaaacgattctgcagacaacactgtaacgcccgcactcatccgccaaggacagcaaactgtatcattcaaggtgaccgccgcagacagagtactcggctatactgatcagcaggttacagtcaattcagatgtcacagcggacatatccgatttaaaacgcactgagttaggcattcgtctgaatttgacctggcatctggatgcatccgcggccgaaagatatctgtatgattttgaatatacagatgaagaaaacgataatctaagcggctatgccaaaccggattatcaggtcacagacgataaaggaacaaattacggtaatgaccagatacacattaatcaagttcaagccacctcggaagatgtcgaccctgtatcagtcattagaaacgaagacggcagcgcagactgcatcagcaaaatctttatctcggatgtgccagaagacgcaaaacagctaactcttcagttaaaacacaacgggcagaccattgatgaaatgacggttgaaatttcgctgaaatagctccttcataatatttaagcagataattttcaaggagaatgcagctcactttaaattgcattctccttgctttttgggctgtcgggaaatggacagcccctttatcttttaataaaacagaaaataagatgcctatacagaaagtatggctttatcaaggattgcttttacctccgcaatacttttcctggctacatctgcaatcaattcaattgaacagcctttatcatacatactccgaataaactgctctgtcatttcttccgttacttctcttgttacttcttctgttactttctttgttacacgttcagtggtttcttttatggctctttcttcaattccttcacctaaattacacataatattcacgtcccttcttaaatcatcattcatcagaatatgatattcattttctataacctctattttctcctgtacttttattttatctgataacaatgcgttaagtaatcgatgcagttcatatttcttatcacgttcaggtaaatcttttgtcaatccaatgaatataatatttatcaaatcctgcttgcctttccagtggcactcacctaaaatattctcattagcaagataatatctggataaactgttttcattcatatccagacaaatccagatgttgaaaaccctctttaaatcattatactttgacttcacgaaatctctgcctttttgtgaagaaatcatccggcttacataataaatacttctgttcaaaagatgatagtctgctggctggtctttctgtatctcaatgttaataatcatctgcgccagaccatctttcatccgtacataaaaaatgatatcaaatcgtatcgttccttcgttaatctcactgtcttctgtattcagccctttaattgactcagttaatatagttctttcctttatcctaccagtattggtcattcctggattaactggtacaatcccaatcaacggctctccttcaatatatgcaactgcctcttccggctgcatccccttgaattcatcaacagttcttacaagtatgtgagccagtatcatcttctgtccaatcaaccgcttcgcacaagcatcatactgtgccttatcatttgcagctgcaatagtgttcatcagctcagtgttcatagttcagcatccctctccctgtgttcttcatttcggttataagttacatctaaacactcaatgattccacaagaagcactccgcttaccctcattataacgaagagaaactctggaatcagcttaaacgagatgaaacacgctttgcgagtttcattcgttatcgcgatactcgtcaaggccacatgcaagcctgggctttgactcgttatccgcgtaaaacacagcatctgcgcaatatgcgcagtatgctgcttctgtatattctataggtttctctttcgtaagcattaggcagaacgtatgtttttattatatcatacatatccaccgcatgcaatgcaatatccgttaatattccgttattctttattcgtcatattcgacagtaaacgccgcaaaatcaaggtttgtatacgtatgctcttctccgtcttctacgcctgttctcacataaggtgttactgtcagagatgtgacatcctgattcatgccttcgataattccaaacatttcccgataatatttgccgtcggcttcataagattttctctgttccgcaccggaccagtcatctccatctacagtgaacacaattgtctgtctcgtatccatattgtcttctgttgtaaaatgattgccgttgttgtcatccagtgccataaataccacctggttacctccgccctcgcttgacatcttatcgtaaagctctttctggctttcatcgaattcccagatcacatggatatacgtacctgattctgcaatttttaatgcatccacggtagctaccacaccatcctctgttatcacagtctgtgccggcttaatgatggcattttcatccaatttggcatcaaaggatatggtctgagtacccagagaatcggcatccactatcagtgatgctgtaaaagaatccggcacatcccttcctcccagctgaacggtgcccttataatcaccctttttaacaccggagccttcattctccttaacttcctcatctgaaagcttgtcaaaatgaatcatatacaccgcatctccgatagccaatcggtctgaatttaactgatgcctttttcctttacctgtcgggcgtgcataaaatgccagactcagaccatcataatacacctgggtaatatctagcagcggctcactgaccccttttacctcagcagcattatcctcacctctgatatccaccataatctgcggccatcccggcgttacggtctgattaaaagcgctggcatctgttgtcaaataagcttccgcacctgtctcatccacttctcgacctaccagtgatgatgcaccggattttgtcacagcatagactcctccgccaagaatgcctgccagaaccaaagcagcaacagctattttaaccactctccaccttcgatttgaaacatttgcactgcttcgtctatcttgcatatacttcgtatttcgtttattaatttttccttttacatggtttgttccgtcattcacctttacctcaatttcatcatccgctatttctttttccaccatctcttttaaagccattctaaaactttccggtgtttccgggaaatccttcccccaactatttttctcactcataccgcatcctcctgttcatacatacgccgcatcattttcctggcccggctcagacgcatttttactgcactgtcccccaagtccatcatctgaccgatttccttgattgtatattgattcagataatacaataccagcggcaccctatattcgatttccagtgacatgattttctgatacaaatctgaatattgatgctgcctaatctcttctccggaaatctgttcatgataagctgcctcacgtttcctttgccgcagcatacgataacattcattcagcaaaattcgtataaaccaggttttggcatatttcttctcacgcaacgtatcaatctttgcgaaagccttactcactgcttcctgaacagcatcctggcaatccgcatcttctttgagaatcgactttgccacacgataaaaatcatccgtgccgtcgataatcaacgcccctaactctttcttgttcatcctcttcacttcctcctttgatgtatacaccatttatttattcgagctctcatacaactatctgttatatctattagatgcaaaaatactgaccctcgtcacaactttttctcatattttatcattttactgctatttttcgaaaaaaataacaaatcatccattcaccttggtaacgccctggatttcagcaatatttctttgatattttaaccaaaatatgatataataaatgaacaatttttagaagaaaggacggtgtgtccattgaagatgcaggaatctccagaagattatctggaaaccatttatatgctctcacttcacagctcagaagtgcgttccatcgatgtagccagacatcttggttactccaagccaagcgtcagtgttgccatgaagcgactccgcgaaaacggatacgtcaatatggacgacaacaatcttctcacgttgacagaatccggtctggccatcgcccgaagcatttacgagcgtcaccaggttatctccggttatctgatgtccattggagtcagcgaggaaactgcgttgaaagacgcctgccgtattgagcatgttcttagcgaagagaccttccataagataaaggaaatattctatcagtcacgcaagtaataaaagcattgtactgctaaataataaacggactgcatgatgcctttttctttgtcacagaatacgaaaaaccttactacgtgcaagaggcagtctggaattcagactgcccctttttcttttccctaaatgcaatttgtaactgttcagagccaagcaaaatttcaaaaaacaggtataaaatgcttgcatttttaaaactgtttttgaaatnnnnnnnnnntgcaatttttataatttcacattattattttgcaagttccttgtatttctgataacgtgctttgacatcttcaatttctttctggtaaagtgcatctgctttctcagggaaattattcttaagagaagcatatctattctctcccatcatgaaatccaggatcttatctgtatctggttccggtgaatccagctggaatggattctttccttctgcagcacgacgaggatcataacggtataaatgccagtaaccgcattctactgccttcttcatttcctcctgagagcatcccataccggccttaatatgctgctccagacaaggacaataacaaattacaattgaaggtccatcataagactccgcttctcttaacgccttcagtgtctgattcggatctgctcccatagcaacctgagcaacatagacgtacttatactgcataagaatgccaccaaggtcttttttagctacagttttaccaccggcagcgaatttagctgtcgcactgattggtgttgcctttgaagattgtccacctgtattagagtaaacttctgtatcaagaacaagcaggttaacattacgattctgtgccattacatggtcgataccaccgaaaccgatatcataagcccatccatcgccgcctactgcccatacggatttcttcgcaagatattccttatttgttaaaatatactgaatatcctcatttacaggaagctgttcaagtgccttaacaagattatctgtgacctcacgtgatttttcagaatcattccagtgttccatatattcaccgataaccgccggttctgagcctgcatttttcaaattctcaaggcggatcaacagttctttgcgaattgcatcttgcgccagatagaaaccataagcaaattctgcgttatcctcaaaaagtgaatgctcccatgccggtccatgtcctttgcaatccttgcaatatggaagaatcggtgcaccgccggatacagcagatgaacatccagctgcattaccaacgtacatatggtctccgaacaactggctaatgagcttaatatatgttgtctcggcacatcctgcacaagcagcagagaactggaagtatggttttgcaaactgaacattcttaattgttttatcattaatgacttcttttttgagataagcttcattcattgcaatattatcaaaattgtcctgctcactcttctgctcttcaaatggtgacatgacaagcgcatcatccatcttttcgttctgattaaccgggcagaccgtctggcatacgccgcaaccaagacaatcatacggagatacctgcattctgaagaaatagttcttctgattgcctaatcctttagccggtgctgtaacaaatgatgctggtacagccgccttctcttcttctgataataatacaggtcttattgccgcatgcgggcaagccattgaacaacgattacactgaatacatgaatttggattccactgtggtacctttgttgctacaccacgttttgaataagcagatgtaccattttcccatgtaccatccagtacaccatacttctgaaaaacagaaacaggaagtttatctcccatctgtcgatccataggaactacaatatcacgtacaaaaggtgttgcattcttcggcatagctgcaggtgtatcttctgcggttgcccattctgcaggtatattgatttttactgctgcactgattcctaaatctactgccttattattcaagtcaacaatcttctgaccggcctttttgaaataggaattatagttattgcgtttcatatcttcctctgcaacatccatcggaataacctttgtcagtgcaaaaaaggctccctgaagaacattgttcgtacgttttccaagacctatttcagctgcaatcttagcggcatcaataatatagaaattaatatgtttctttgcaaggtctcttttaatctttcctgtcagtcttgtctcaagttcatcctctgtccatggacaatttaaaaggaatgtaccgccctcttttaaatcctctgtaacatcatatttaccaatataagtaggtgcatgaacagcaacaaagtccgctgagttgaccagatatgtagagcggatcggttcatctccaaaacgcagatggctttgagttaaaccgcctgatttcatcgtatcatatgaaaaataagcctgagcatacttgttgccaactaatccaatcgtactaattgcatttttattggcaccaacggttccatcaccgccaagtccccataatttacaggaaatttgtcccggatgaggaatttcaatctctttatactcaagagaagtatatgtcacatcatcattgataccaatagtgaaattgttctttggattatcctgacgcagattgtcatatactgcaataaactgcccaggtgtaacatcttttgatgaaaggccataacgtccgcctacgactgtaatatcttttcttcctgcctggtttaatgcagttacaacatccagatataccggttcaccgacagagcctgtttctttactacgatcaagaacagcaatcttcttgcagcttgcaggaatagctgctgcaaagtgttctactgaaaatggtcgatacagatgaatctgtacaaggcctaccttccgtccattagcattaaggaaatcaacagtttctttgacagcttcagatgcagaacacataacaacaataacttcttccgcatcttctgcaccataatagttaaagagtttataatcccgtcctgtaatcttattaatttcatccatataatgctgaacagtttccggtacaactgctgctttaacatttgcaccctctttacactgaaaataaatatccggatttacattattaccacgatttgtaggatgttccggatttaaagatttgtgacgaaaagcatccagtgcttctgtatccatcagtggacgaagatcttcataatccagtgcctctattctctgcatttcatgagaagttcggaaaccatcaaaacaatgcataaaagcataccctgccttaattgccgaaagatgtgcaaccgctgccaaatccattgcttcctgtggtgatgatgacattaacatggcatatcctgtggtacgacatgtcataaaatctgtatggtcaccaaaaatggaatgatgattagatgttacaactcgtgatgcaatatgcataacacttggaaggaactggcctcccatggcatacattgccggaatcattaacatcaatccctgtgaagatgtaaatgtcgttgtaagtgcccctgcctgaagcgaaccatgacaggcgcctgccgcacctgcctcagactgcatttgcgtaatatctactgtcgtaccaaagagattctttttccctttcgctgaccactcatcaactttttctgccattggcgaagatggtgtaatcggataaatcgctgccacttctgtaaacgcatatgctgtatatgctgcagcagtatttccgtccatcacaacatatttcttactcataataatattctgtctccttattatataaattgttctttatatgtaactgttcagagccaagcaaaatttcaaaaaacaagtataaaatgcttgcatttttaagactgtttttgaaattttatttggcggatacgccacaccgacgaaatgcgtagcattttggaggtcagctctgaacagttacctttatattatataattaaacgaaattacaaacccgggcaattgccatctccgtaaatccaagagattctgcctttgtttgtcttccgcttgctacttctgctgttaatttaaggaaatcatcccccagcttcttcaattcaccaccataaataatcggtgatgcatctacatcaatattgtcactcatattagcatacgtcagtttgttgcctgttattttgatgacaggtgcaatcggattacctgtaggagtaccacggccagttgaaaaaacaacaatctgtgctccgcccgcaaccattccggctactgatgaaggatcatttcccggggtatccataatcacaagaccctttttcgcctcaacctgttttgcataatcatacacttccattaccggtgtatgaccacccttatgaatacatccgagagatttttcttccaatgttgtaatgccgcctgctttattacccggagaaggattgccttcacgcacctcttcacctacaagctgcagtgctttttcatatctgtgaacaatttcaaatattctgtcccgcacttcaggtgttgcagctcgtgaagccaaaatatgttctgcacctataaattctgttgtttcagaaagaattgaagttcctccttcagctacaatccgatcactgagttcaccgatcagaacatttgctgccagaccactggttggatcactgccgccgcattctgttccaataattaactcggacattgggaattcttctttctgaagaagtgaagcctcttcaaccatctcttttgcatagcggacagcaatttctgctgctttgattgttcctcctgcttcctgaataatcacctgtttcaaaggtttatttgttctctcttcaattgcctttaccacaagatccatctgacaattttcacatcccagagaaacaacaaccgtaccatacacattcggattcgcagcataccctgccatcacatccattgtgtactgctgatccgacgccacctgggaacatcccagctgattattaaatgtaaccgatccaacaacctgtgacgaaataatacgcgctgtatcagaggcacagacactcgccggaagtatgagtaccatattacgaacacctacacgtccgtcaggtcttctgtatccataaaaattcattgccatatcctcctattttactttagcttccaagttttctctatgtccttcaacgttatggatatgaacatgttcaccagcctttatgtctgcgacagcgataccaatatgttcaccatatttaataacaggcattccctttacaatatcgcgacaggcaatcttgtggtaaattgtaatatcctgaagtgcagtgagtgtgttttctttaccatcacacatccatgtgacagtatccccttttgcaataggctcaatagcaacaatcacattgtccctactatctataatcatcgcattctgcatatgtatcctcctatatttaatacagtaactgttcagaaccgccaccaaatttcggttctgaacagttacatatgttccttattaaagtggaataatcagagcaccaataattgcaagtacaaaaatacatactgatgaaataaaggaacccagtgtatatgttttaagacctccggttacggttaatccagacatatttgttgcaacccaaaaaccggaatcattgacatgtccaattgaattacctccggagagacatgcaagtgcaatccataccggatggcatccgatagctggtgcaatcgttgccataatacccatggaagtcatgcctgcaacagtacctgatccctgtgccacacggaaaaccaaaccaataccatatgcaaggaacatagccggtaatatagatgttgtatttgttcctaacagacctacaattgcatcgccaattcctgtagctgtaataacagacgcaaatgaaccgcctgcacctgtaatcaaaagtacaacacctgcactcttaagtgcctcacccgcagacttttcgattccattctttccaaggtatggcagactgactaaataagcgccaagtgtacctaacagcatagcaataactttatctccaaggaatgagcaaatcacaggtttctctgcaaataaggccccaccgattgtaccaaacagaatacaaacaaccggaatgatgattggaagaagtgaaataagcagagacggtttcttggttctatcttcctgactctttcttccttcacgagctgcaaccaattcttctgtaacatttgagctatgattgacatccttttcctcattccaaataccctgatcatgaatcttgatataaatgaaattggataccataactgtaataaagcctacaattaaacctacaataagcataataccaaggtcaaagccaaaaatatctgctgctgcaagtggatttggtgttggtggtacaacacagtgtgcagttgttgcaccaatcgtcagacatcctgtaacatatcccattttaagatcaattttagaagcaattgtaataccaattggaataagaataataaatgttacatcaaaaaatactggaatggataaaataaatcctgcaatacttaagccccagatagccttttttgccgggaatgcagatacaattttatctgctattacctcagctgcaccgctatcattcataagctgtccaagaatcgtaccaaaaccaaccggtaaaccgatacttgtcatcatatttccaaatccagacgcaatcgtcgatgttgtagtgagcaaatcgagtccacccataacccccataactaaacaggcaataaccataccaatcgctgcattcaatttcaatacaataatacagaacagaatgacagcaattgcaaccacaagagccaaaatcaataatccaggtgatgtcatactcttttccttcctttcctctctttaaatattaaactaaaacaaatttccattttcatcaaatggcaaatcatatggttctgtaagaatttctatatttggattttcttttgctaacggcaaaagtccttctgatatttctatgtattcgatatgcgcggtatccggtatacgaatcattttcatgttattctgatcctctgcttccggacagcaacacaaagcaagctgcaatgcctcccgatcattatccatgatcataggaattttcataagatgtaaaaatgtgttggttactcctgtaggatacgtcatttccagtttcattctattaaccaaacgacgtgtcgtaacttctgcaagtcctactccctgtgcattgccatgtgtctcatctgtaatatctaaaatgacacacttctctgcctgaattccgcctgagcaatactgtggaagaacaaatcttccggatatatttggatccattccatcgccggaaatattcttaccaatcttatcaacaactaaaacatcacatttatcaaacaatatatgtgcgatcgtcttataagaaagttctttaagcttcggctcttcagtaataatttcctgcggcgtaagccctttgatcagatatgtttcatcataagcattttcaatgactgcaataccgccaataataggtacgttatcaataaatgtccttccatactcctcaattaattcgtgcataattgccggactttgatgatgaatactctctgcacctttctgtttgccaagaccaattgccatcattttcataagaccactttcataaggtcccctgaaagaagtatgcggcttaatacggttaaaaaggataataccatccgcctctgaagcatttttatccataaacacaggctggtgtcttacaccagataaaccaatctgtaccgtatccattgaactcttaatcggacatcccattgcttcttctgtaatgccataatctttaagaatctgaagctgtccttcagcagttgcgccaccatgactgcccattgcaggaacaatatacggttctgcatcttttgacttgacaaaatcaacaattgcttttgccatcactgcattgttactcatcccgcggctgccacatgtaattgcgatgcgcattccaggtttcacctgaccacccagggcttctcgggacaattctgcatttaccatatccgcaatcatattcaccggaatatgtgtatcgtcaaaaacctctcgaattttcaccatgcgtggtacagatacccctttaatgagatctgtaattgtttccatgttcttttctcccttttatgttttatttgttcctatataagaactcagttcttatataagtttttatgggtatagtttagcaatatgtttattttttgtcaatcaacaaagtcaacaaaaaagcgacttcaaatttgttatgttttttgatctgtttggcaagcattttgtcggaaataaaaaaagagcctcaattaaaaaaattgaagatctttttattcccttatatttcttatggctttatgagttcaaagttatacaatcccacaagttgttctatttgctgttgtgcctctctcagacattgacaaatctgtactctcttttcatctgtatagcggaaaatcggaacagaaatacttaatgctgcatcaactctgccattctgccggattggtacagcaaaacaacgcatctggggagtggactcctctgtttctgttgctatttctccgcatcgtatctgttcaatctgaccaagcaatagatccatatctgaaatcgtatgttccgtaagctttggcaggccatctctatacagatctctaatctgttcatctgtaaggtcacttagcaatgctttcccgatggcagttgcatttgccggaagttttgttcctacccaggatatcattcgaatggcctgaggcgaatctttctttgccacatataaaacattaccaccttccaaaattccgaattggcttgtttcctgtgtagactcagttacactattcataatgttgatcaatggttcaaatccgctttgtgacgtacatgaagcgccaataatatatgtacgcaatcccaacctgtacttcccgctccccgcatcacacataatatactttctctgctccaacgtatgcacgatcgggaaaaggctgcttttaggtgctttcaaggctactgcaagttctgtaagtgtaagtccctcctgaacttcagaaagtgattccacaatatccaatacacgtgccgttgccctatgttgttcttgtcccataaataacccctttaaaaaaatattccataaaatatactgcaaaaattaacctttatctttaacgtaactgttcagagctaacctccgaacagttacattttaacaaactttatttaataatgcaatgatagcgtgaccgggtaattactcacaaaagcagtaaaaaataagggcgtgtgaaaaacgaaagtttttcacacgcctttattttttatacagcatgttcaagtaaaataccctccaatgctgaaccgctgcttgtgtggcaacgaacgattttaaatttctttttctcagcttcatctacggcacatcgtaccattttgtgagaaacagtatttgtaaacaaaatgcataaatcaggatcaccaatctgcttgtccaaatcggcagacatctgagtgaatacctttgctttacatttatgagatttacaaattttcttatactgacagaccattctgtcatgaccaccgatgataacaacactcatggctatcctccttctcaaaacattttttcagctgttcagaaccgatttccggactgcccggtctttatcagtcgatgagattgtcttcggccctgaacagttattattttaaataccttcaagtaaaaatgagtataagtgataaaacttcgaaatcgtattgctgttaattataaagctgctaactctttgccaagtgcttcgagtttttcttcagcttctgaatcaggctcattcatgcaaatagcatcttcaccgccgtatacctgggcaccggcctcttccatacgagctacccagttgcgcatccattcaccgtctccccatccgtaagaaccaaataaaccgattttcttacctgatgcaaaactctcaacttctgttacgaaatcttccatgtatgtttcttcaagagtttcatttcccatggatgggcagccaagagcaaatacaggataatcttttaaatcgtcagctttgatgtcttctacagacacaacctttgctgttgctccgccatcctgaatacctttgcctaaaattgctgccattgctgctgtgttgcctgtaccgctccagtatgcgatcataatttctttcattgttaaaactcctcctataaaaagtgtttaattatatcaaaaacggtgaatgaccgctctgattatacaaattgatattgttctgccattccaaaacccatgccctgtctgaccatatccatggcaatctgcttgactctggcatatagacggaatgtctcacaggccttttcttcattctcatatactttccaatatccgctgcataagcagttacgaccatgatgttcaataaagcctttgacatcccccagcggatatccaagaaaaatacccatttcatgaggaaaatccgctttgccagccttgtactctctgaaacgttttgctgcataaacaagcatctcatccatcgtcatatcttcagtatacccaaactgcttcataaaagccctgttatcaggatccatcagttgcctgtaaaggggctcctcgcgaaacatgaaccatacctggcgttcttcacgatgttcaaagcaccgcaccttcaggcctgttgtttcaaccagagatttcaacgccttagcgtaactctgctcaataatcagcaggtttgagggcttgataccaaaaataaccggtgcacactgctctgctgctttttcctgtattcctcttattatttcatacgtctgcctgtatgcaaccatccttttactctcctttacttagttagatatacctaaccacctgatgtcattatcataccagctctgtcaaaaaattgcaataccatttattgagaatgaatctcattaccatgtttattgtcatttttcatccaataaagtgttaaaaggtactcgtttatgctatactaaaagcagttttttattaaatataaggattactggagggaaaaatattgaatacaccacctgatttcagtaaatataccaaacagcttaacatagagcagctaaaaaaacaaggtacacaggctctggctgatgaactttcctatacacgacagctttatgaatctctggacacaatttttcaggattccctggacggtttctttatcacagatggcgaaggtaatgttttaaaagtcaacaagtcctatgaagaaatgtccggcatcaccagtgaagagattatcggtcagaatatgcatgaccttgaatctacgctaatcaattattctgcttcactgattgttatgaaaacagggaaaaccgcaaccattgaacagagttttctcagaacagggcgtaaagcttacatcaccagtactcctgtattttcacccgaaggcaaaattatcatggtcatcagcaatacccgtgatttcaaaatgatcgaagaactccgtcagcagctcagtgaacagatggttcaggtatccgaatacaaagagaaaatccgtgcgctgacacagcaaaacattgaccgttcccagtttctggtcaatgatcctaaaatgtacgaaattctttacagtgccaccaaagtagctgacaaagataccactgtactcattcagggtgaaacaggaaccggcaaggaacttctggctcactttatccatcagaacagctcccgcagggataatccgatgctgagcgtcaactgtggtgccattgccaaggatctcatcgaaagtgaattattcggttatgaaggcggcgcttttacaggtgccctctccaaaggccgccccggctattttgaagttgccaacggcggtacattatttcttgatgaaatcggtgaaatgcctatgaatgtccaaatgaagcttttgcgcgctcttcaggaaaatgaaatcatgcgtctcggttccagtcagccccgcaaaatcgacgttcgcgtcattgccgccactaatcgtgatctgaaagaaatgattgatgccaatgaattccgttccgacctttattatcgcctgaatgttgtcaatctggaaattcctcctcttcgcgagcgcaaaaaagacatcatccctctggctcaacattttcttaatcaatttaatgccaagtttaaaacacataaaacactgagtccttactcctgcaaaacgctggaagaatataactggcccggaaatgtcagggagctcaagaacaccattgagaagatggttattctcagtgatgaagatattatttcatctgccgaattatggagcagcgaatccagtctgatcaaagataatgtccagcttggcaatatccagctgaaaaccattcttgagcagatcgaactgaagtatatccgggagtactgcagtttatacggcacccttgaaaaaacagctgaaaaactggatatgaatttgaaaactctgtcccgaaggaaaaagcaccttgaagaaaaatatccccgttctgaaaatctgtagttcttatttttgagaagtttctcatttttgagatttcaatttgtcgttttttctcatttttgagatatacataaaacagtcctgccacgaataccgcaaaacagggctgttttttctttgtcaatgttggcacgcatcttgcttataactaagaatatcaagtactattgatacatttaatcaatggatacatgattctaaactatttacacattttaaatttttgggaggaatttattatgccattaatgacaggagacgaatacgtaagaagtctgcagaaaatcaaaatgaaaatctttcttttcggtgaagagattgacaacccggtaggtaatccgattcttcaaccggctgttaattcagtcaaagcaacttatgaccttgcacaaaatcctgaatatgctgatctgatgacagcgacttcaaaccttacaggtgagaaaatcaaccgttttacacatattcaccagagttctgatgatcttgttaagaaagttaaaatgcagcgtttgcttggtcagaagaccgcagcctgtttccagcgttgtgtcggcatggattctttcaattccgtgtacagcacaacatatgaagtagataaaaaatacggcacacactatcatgataattttgttaaattcgctacttatgttcagcaaaacgacctgacagttgatggcgccatgacagatactaaaggtgacagaagcctttctccatccaagcaggcagaccctgatcttttcctgcatgttgttgaacgccgtccggacggtatcgttgtccgcggtgcaaaagcacatcagacaggtattctgaattctcacgaagtgattgtcatgcctaccatcgctatgggacctgatgacaaggattatgccgtttcttttgctgttcctctggacacagaaggtttaatgatgattgtcggccgtcagagctgtgatacaagaaagactgaaggatgccagcttgatctcggcaattctacatacggtggtatggaagcactgacagtcttcgataatgtttttgtccctaatgaccgtattttcctgaatggggaaacagaatttgcaggtatgctcgttgaacgttttgcaggttatcacagacagagctatggcggatgtaaagtcggtgtcggcgatgtcctcattggtgctacagcccttgcttcagagtataacggcgttgaaaaagcttctcatatcaaagataaactgattgaaatgattcatctgaatgaaactctttactgctgcggtattgcctgttcagccgaaggtcagccaacagaatccggcaactacctgattgatctgatgctggccaatgtctgcaaacagaatgttacccgtttcccatatgaaatcgcacgtcttgcacaggatatcgcaggcggcctgatggttacactgccttccgaaaaggatatggatcatcctgtagtcggtcctgttatccgcaaataccttgcaggccctgcaaaggtagatgttatggatcgtttcaagattatgcgtcttatcgaaaatctgacccttggtaccgctgctgtcggttatctgacagaatctatgcatggtgcaggcagcccacaggctcagagaattatgatttccagacagagcaatatgcctgctaagaaagcaatggcaaagcacattgctcatattaaagattgatgatcggaggtcctccctttgaatacactgaacaagattcagcaagttgtatccgatcgtatccgccctgcccttcaggggcatggcggtgatatgaccattacatctttctcaaatggaattctcaaatttaaatttaccggcatgtgttctaattgtccttcagcatggattacaacagaggaactagtgaaaaacgaaattctttctaatgttcctgaggtaaaggacgtccaaatggaatttgctgtcagtgatgaactgattgacatggccaaaaagctcctcaatcatgaaacatgataaacatgataaagtataaaaaggaacttccgatttaaaccataaaccggaagttcctttttgtgtacgaattaatatttatttttatcaggactactgtatagtcacttcaacaatttcatcagccgcattgtaattataacctttacggcgcagtacattttgaagtacttctgtccattccgtctgattaaggacgattttattttgatttttcaagagaatctggcatccgcttcctgaacctaaagcggtctggggtttcagtgttgccacctttaacaccccgatatccgtcagtgtattgaccatacggtataccgttgccataccgatacccggatcacgctgaatggcttgataataaatctctttacagctggcacattcatgctcgaacacgatatccagtatcagctctctttgctttgtcacgcgaaaaccacgttttctcagtaaatagagaatttcttccttctctctgctgacacgatgatattgttccgtgtctctatttgcaacagctgctgccgccaccgcatccacctccacaatgactgcaatcaccacagcccttgccatttttcttatctttaatcatcgagcgaacaatcgctgcgacaatgactatcagtataacgcctactataagagttcccattaagcactcgcccgacctttcaaatcaatttaagctactgctttgccttttacttctaatgtgttgctttccttgtatggacggaacagcagatagaagaatccaatgattaccaggatagcgacaactgtgaagataccaaatgtgtgatttgcaacaaggttaccaatctggttgataacgagggctacaagataagcgaaaccgcactgatagccaattgcaatccagaaccattttgcattgttcatctcacgcttgatagcacccatcgctgcaaagcaaggtgcacacagcaggttgaatgccatgaatgcataaccggaaacaagtgtgaaggaagctgccattgtctgatatactgtaccatcgccgccaccataaaggatacccagtgtaccaacgatgttttcctttgctacaagacctgtaacagatgctacagttgcctgccagttaccaaatccaagtggtgcaaagatccatgcaattgcatgacctactcttgcaagaatactgctgtctaactggtcttccgcaagcattgtaaatgcaccgtctacccaaccgaagtaggacaggaaccaaacaaggattgttgataatgtaataattgtaccagctttcttaatgaaagaccagccacgttcccatgttgctctgagtacagcacccggagtcggaatatggtatgccggaagctccataacgaaaggagcaggatctccggcgaaaatctttgtcttcttcaggataatacctgaacagataattgctgccataccaaggaagtatgcacttgttgcaacccatgcagcaccgccgaatacagcacctgcgatcatcgcaatgaaaggtgtcttcgcaccgcaagggataaatgttgttgtcatgatggtcatacgacggtcacgttcattctcaattgttctggaagccatgatacctgggataccacaacctgtaccaacaagaataggaatgaaggatttacctgaaagaccgaatttacggaaaattctatccatgatgaaggcgatacgtgccatgtaaccgcaggactcaagaatagccagcaggaagaacaggacaagcatctgaggtacgaaaccaagaacagcaccaacaccggcgataataccatctacaatcagaccctgaagccattcagcacagtttgcattttcaagcaggccgctgactgcatcaggaatactgctgataaatgtgccatatgctgccggatccggagcttcataaccagcttctgataaagcagcgacagcatctgtcagatctgcataagaagcagttgtttcttctgttgcaagtgtttcttcatcttctacaagatatgttgcctctgtagatggatctacctgggcaacaaatgcattcactgctgctgcagctgccgcaggatcataatcatctgcttcagaatcaatggctgcttcaacagcgcttgtatccataccctgatctgcttcgtaactgatgaatccatttacaacttccagagcacctgcataagcttcatcagcatcaccataaccgccgtcgctgccgataaagaagccatcaccgaacagattatcatttgtccagtctgttgctgcagcaccgattgttgtcatggaaatatagtaaacaaggaacatgatcactgcgaagattggcagagccagaatacggtttgtaacgattcggtcaatcttatcagaaattgtatctgcgcccgcatgttttttcttcaggcagctgccgataatacttgcgatatattcatatctttcatttgtgatgatactttctgagtcatcatccatttccttttcggctttggaaatgattgcttctacatttggtgcgctcttcatctgagctgcaatcttgtcatcacgttcaaacaatttaattgcatagaatctcttctgagcatccgcaacatcagaaccaagaagtgtttcaatatcattcagatatccttcgactttattgttaaacttatgtacagtgccctgaacagctttggactgagcagccttaacaactgcatcggatgcttccttgatacctgtattcttcagagcagaaatctcatatacaggacagccgcatacttcactcagtttctgaatgttgatgttatcaccattcttctggacaaggtccatcatgttgatggccataataaccggaataccaagttccataagctgtgttgtcagataaagattacgctcaaggttcgtaccatcaacgatgttaaggatcgcatccggtttctcgttcaaaatataatttcttgctacaacttcctcaagtgtatatggagaaagtgaataaatacccggaaggtcagtaataataacgtctttatgaccttttaatttaccttcctttttctcaactgttacgccaggccagttacctacaaactggttagaacccgttaatgcgttgaacaatgttgttttaccgcagtttgggttgccggcaagtgcaattctgattgccatttttttacctccagattttcaacaattagaacagttaaaacaaacgataaggtttgattaagctaaccttatgtcctaaaaaaaggttcaatatttactgaacctcaatcagctctgcgtcagctttacgcaaagataattcatatcctctgactgttacttctatcggatcaccaagcggtgccactttacgaacatagacggatgtgccttttgtcagacccatatccatgatacgtctcttaatagcgcctacacctgtaatctttgaaactgtgacagtctggccgactcctacatttctaagtgtcatggctttgtctcctctcttatctgaatgcgcatgcattctatctatacagacatccgattaacgattcaccgtaatcttggatgccatgccacgattcaaggctactcttgaacctttgacagcaataatcatgccggcatctgtattgccgacaacttcaacatctgttccggcagcaaatcccagattatgcagatgatggataacatcttccttgccgcggatatctgtgatcgtacctgactctcctacacctaataaagctaaaggcatcatgtttcctcctttaattcaggtccatgtatgcagaaccttgtgcatttattgataacggctatcatttacagtgttattatacgcattcgcaaggttagtgtcaactatcttttttagttttattgaaaaatattctcattttcatccatttcaatgcaattttgtaagttcttactgaaaaatcctttcaatattagccactcattgaaaaaatttacctatatcacacttaaaccttactgagattacagataagcctttgatagactggcccaatatatgctatactctatttatatctattgtgaaccgctaaaatcccaatccaaacacgccagggttctcaatctctataaaaggagtactgccatgccaagcattatctttcatttaactgaagccaagctcatcactcaacacctgcgcgaggcatctgctgattacccgtttacccatatacacggatggcagaacgatttcaccatcggaagtatcctgcccgatgccattccacgtccattaaaatataagacccatttctggcatccgtctgatttcacccatgtagtgatcgcaccagatcttaatttatggcagaaaacatatccgaataccctgaaagaaccgatgctgatcggctatcttgcccatcttcatctggattatctgtatttcaccgagtatctgccatctattgtccgctttttaaatgaacagggactggatgaaacagaatctttaaaggcagtctctgtccaaatccgtcaaacaggggagcagatgcctgtgatgacctttttctccaaagattatttttacggtgactatatccggatgagtccgcatcttattgagaaatatcatctttccatgcctgcttcaccaatccatccatggccggtgaatgagacagattttgcctcctatcgccagttctgcgaactggctgctgccgatctgtcactggacataaaaaaagagccggtcaggatattcgacccgaccgacttcgaaaactttgtaaataaagctgctgaaacatttattcaacagtttatccgatagtttttataatcgtttactctgcttgcactacgatttaccgtttcaatctgcagcacaccgtattatttgctgtctatcacttcaagcattttatgccgcaacaattttctcaaactcacggagtttctgctttgcttccggactcagattacgcggaacatgaatctgaacagctgcatacatatcaccatgaacagacggatccttcatggaaacaatgcctttgccacggagtctgatcttgctgcccgactgaataccggcaggaatcttgcatttcacactgcccttcagagtattcacaatggcctcaccgccaaaaacagcagttgtaaacggaacagaaattgttgtataaacatccatgcctttccgctcatatcccggcttctcatctacgtggatcttcaaaagcagatcgcctgcttcgccgccattcatacccggaccacctttgccgcgaagacggatactcttgccatcctcaatgcctgccggtacacgcaccttcaggctctgagccggagtaccctgcccactgcttaaattaatcactttctcacagccaaaggctgcatcttcaaagctgaccctaatctctgcatgaagatcctgccccttgctcttgaaactgccgccgccaaaaccgctgccatagctctgcttgaatccctggccgccgaaaccgctgctacttctgccatggaacatatccccgaaaatatctccgaagatatcatccatattaccgttctgtccacccttaaaatggaactcctgataaccgccattgccaccaaaaccgccctggaaaccgccaaagccgctgcctgcaccgccgtatgcgccgcctgctgcaccttcttcaaaggctgcaaaaccatactggtcatacagctttctcttcttctcatcaccgagaacattataagcttctgtgacttccttaaacttctgctctgcctgcttatcccccggattcgtatccggatgatatttcttcgccagttttctatatgcacgcttaatcgccttgtcgtctgcttttttatctataccaagaacttcataataatctctcttagccatcactgtccacctccgtctttataagacctttctgaacttcttctattctgaacgcatcatgttaatagaggacacgaccatagccgtatcctcttcaacgctttttgttctatttgtactataacacccatttcctataatgtcaatagacttcacaaaaaatcttctgtataagtctatcttacaactaagtatactttcattatacaaagtatggcttcacttagttgtcccgatgctatcaattttattcagaagctccttaatatgcgaacaccataatcctctcccttgggttctccccatcaaacaagtcccggcagtctatctcatccacaaaggaaagcatatccaccgtcatcagttcactgatatactcatctgacggataatagaagaacaactgtatctcacggggattttcatagtaggaatcttcaatttttgccagaacttttcgaagaatctctactgaaaaaggattgaagaaaaatactctgtccacctctgcaggtacaacgtagttctcagcattccccatgacgaattccgtccggctgcctgatgcggcatggcgtttgttttcgcagactgtttcatatattctgctatcatattccacaccgacggaacgacatcttgtctggtaggacagaaaaaagtccacacgtccttttccgcacccataatccaacaggcaattacttttccgtatatagccgctgcctgccaatcgctccagcaccgaatacggcgttggctcataagggtatcggtactgatccgaacgtgaatcatcgcgtcccgaagtttttattttcaacaatttatcccattgtgtctcattcgtatctatattacctcacctgtgctttcataataaatgattcgatcaccgaaactacttttcccatatctctattgatcctccatctcgtaattgcagtttttgctcactccgggactcgccccaaaaaagattctggtatactgattatatcaaaacaaagcaatcccaaaacaattgcaaaaatatgattttaattaaatggaggaatttattatggaaaactatggaagatgtaaaaattgtgaatacggtgaaccttctggttgcagctggaaatggagctgtacatggtatcacacactggaagacccggataaactcaaagattgtaatcgctataaagaatgcgattaagacaatctctcacaaaaggctgccaccgggcagccttttcttctgtaagcaaattttctattgaacgctgtctctgtcgcaataacactgatatctttactcctattgatattttaccagaaatctgcaaagaatttatccgcgacaacctaaaagtcattggattctagtacatcacaccaggcactaaataataattccttttaaatgatccatctcatgctgacagatttgtgccgtccaaccactgagtttctggcggcgcactgtccagctcatatctctgtactccacttcgatttctctgtatcttgtcgtcttcctcacacctgtcaatgacaaacagccctcttccgtctcataaggaccacttttcttcaataataccggattaaacatcaccaaatcaacaattcccatattcacaataatgacattcttttttatccctatcatgtttgctgccatgccaacacattccgcacgatgggattttaatgtgtcctgcaaatcacggccgatctggatatcagcctctgtcgccggttctgatttctgccctaggaaaaatatatcctttgtaatttctctaaccattgattttatcttcccactctttctctttgaatcccgtcagcacgaaatcgtccccaatgaccagcggccgcttcaccagcataccatctgttgccagaagcttcagctgttcatcctcagacatttctttcagcttgtccttcagattcatttgtttgtacaatatcccactggtattaaagaattttttcagcggcaggccactcatttcataccaggctttcaattcctcgtaagacggatgctcctctttaatcggcctttcgtcaaaaacaacctgattgacctcaagccatttcaaagctttcagacatgtactgcattttctgtaaactaaaactttcaaagttttaccttgtatgataattaggaagttaattatcacactttcctttctcctttttgggttaaattataaggcggtgtctgtcatggattttcttacatccttaactgttgccgttctgtcaggtgttatttgccatctcatctgcaaatagctcgacggtgacaattatttctctttataataaagctgacaatgacaatagccctcaaaatccggatcctgaatctgtgctttgaattcatcacaaatacacttatactccggtttgatctccagtctgcacggacagtatccttcttttcgtttcagaccttccttgactctcgcaacgatttcacgatcttcgttcaaacgcactttacccatctgtaacgctccttttcttaataatttcctcccactttgtatttcatgatcgctattattttaacatactaaacatgtctagtgaactacccattgtctaaagccaatgggcttcctgcttcacagacctcgtgacctactatctccacaggcgtaaattggggcagtccctgccctatatagttattcttcttatgctatttgtcgtaatccctccgccagtatattttttgcagcgttaatgtctctatcatgttttgcaccacaaactggacacgaccattctcttattgataaatcttttgtctctgtattttggtatccgcaaaccgaacataactggctactggcatagaatgtatctatctttatatattttctaccatagctggctggtatccttttaactctgtcaagcagactccctgcccatttgtgaaataagttaaatcgttcctgtattcttgaatacatctagcagggatttctcctttcagaatgacctcgtcattctttatctgagtacttacaatatctgcacaataccttggagcatcatgatacgcccgtgagagatattcctgcggtgcataaatttcaaagtggagatatggctctaatagttctgtccctgctttttttaaagcctgctccaatacgataggggaaagcagccgaaagtctgcgggggtacttacaggactataatacaatccatattcaaaacagattttacagtctgtcactttccatccatacagcccctgctcgcagccataaagaaccccctccataaccgcattttggaacgattgcagtctgtcactttccatccatacagcccctgctcgcagccataaagaaccccctccataaccgcattttggaacgattgatttaaatatccaagtgaaactctgctttcatactgcactccgcttccaatagggagcggctctatggacaacccgacagaagcccagaaaggatttggcgggacttctatgtggatggtatattctgcttttctaagcggtctttccatatatataacagtaggctcttttatttctgcctccacatgatatttttcctcaaggatggcacaaatgacttccatctgcacattccccaaaaaagataacataatctcatgtgtaacagtatcaatgtcaaaatgcaaaagagggtctgtatcagcaatctctgcgagggcatttaacagggcttccctttgctccggcttttgcggctctaccgttgtccgaagtaatggcatgggattatcaatccatgttttgtgaggcaggagtttttcatttcccagaatgtcgttcagtttcaaagtatcatcagctaaaataacaatttctcccggacaggcatggtcagccgggacgatttcaccatttgacggaacacacatctctgtgatttttattttctctttttcagatattctaataacatccctcaaatgcaatgttccgctatatatacgcacataaacaaaacgccgccttttctctgaatattcaatcgtgcagatggaagtcatttgtgccatccttgaggaaaaatatcatgtggaggcagaaataaaagagcctactgttatatatatggaaagaccgcttagaaaagcagaatataccatccacatagaagtcccgccaaatcctttctgggcttctgtcgggttgtccatagagccgctccctattggaagacagcctgagaaaggaattattgactggacaatgtatttggagaaaacaaaaaagaaaccaactatgaagcagatatggtgtgaatcacagagagaaccggagaattaccccgtcgataaagagcttttccttcactacatggatttatggggagtagaaatagaaggttatcataaagaagagggttaatttcaaaagaagtttgtatttaaagtaaagatgggggactgtgaataaaacatgaaaatggtgccaagagcatttggaaaagaatgctcttggcgctatggagaatcataagaaggggattgtattgattattaaaccaataaaaaaggcattactatatgaggcaggtattatagagtttgcaatgattttattttatattaatgcatcaacattaaaagaaattttgattgagtttggaatatctttagttgtcatttttttagtgattttacatacaggtgaaaccgttattttagatgaaaagggttgttgtttagtttggtttaatggtttattgaagaagaaatataaatgggagcagttaaaaacaaaacgaattttgtataaggcagactgtcgagaggtgttgggttatgaagccaagaagtgtgtattgttgacaaaacgaaaaataaacaacaaatctgtgtggaacaatccttttgtacaaactgaaaaatatacaacagtagaaaaaggagcagaatttgtagagcaatttccatttttgtttcgaccattgagtataatatatatttattttgcagcagaaccagaggattgtaaagaggatgggtgttattattctgtcgtggatgaaaaagcttttatggagaaaatgaaagaatggcatgtagaattggaggataataaacctgaggaaatacctccttggaaagaacaaatttagtgtatagacatggatggttgactttggggaagcgacagttgtaggaggaattgctggaaaaataggtggttcaggtgtaaatgggagaaaattacgaggtatatatagacgagctaatgatggtataaaaacggtaaagtctgccagaaggattgcaaaatatgtagctaaaaagactgctattaaggtaacggtaaaaagtggagtaaagcaaactgttaaagcgggatttttttcaaatattacgaattttgttagaaaattgtttacaaagagcagagtataggaggagagtgtgaagaaatattacgattattatgtgaataggagaaatacgcctcatctggatttgtatacgaagttaattggcatgttttatttctggaatggcatgaactttatattgggcagtgcatatgctttgtccataggacaaaaaaaattagctgttagtggattggttcttggtatattgatgtgtagtttgattaaggacaagactacagataagagaaaaaatcaaagagacttgaaagctgttattggggatggaataatatatgctatatgtgctttgggaatctcctatgtgttgtcattttggttattgctccttgtgtatattttagaaatgatttatgtagcttgggttatcttcatatatttcaaacagcaaaatggacaaagatccagaaagcagagaagaaaaaaagagtattagtgcttggaaaaaaggagcacaatagagatacgttttatattctgtacgaaatttgtaatgtgtattacattgtctgacacaaaagcagtatttatgcgggtagaagggacagaaaggtttatgtaattaagagtcagcagaattggctgctgcctcaaaaagatttggtcatgccagggggaagaaagtcgtgaaagaaataagaggcggtttgccggagcaatagtctgagtgattttatattttcaggaacggtaggatgtgaatgtacagaaaagacgtatgcattggtgaaaagctggctgccggagagtgtgaggatgccaaaggtgaaattctgaaggagcatttgttactgagagtgaaggggatgcatattttatggaatatgtagttgaaacagaaaaagaaattgttcaaaactatatcataaaaagtaagcaggaaagaattgagtgggaattaagtcattcaaagaagcgaaaagatattatatggcatttccataaaccagatatttttaaagaagctagtctgcatgcggttgattatatggataaagaagcgatgaaaaattatcttcataagctaagtggtgcggaaaatgtttattttattggtgaggattatatagggaaaatgctgttggagcaagcagcagagagggccaacgaaggagaaatttgtattatatattgtggaaacggaatcggatattatcaaggagaacaggaaaaaggagctccgccaaggtttatgcttttggaagaaaaatgttgcaaaataccctctaaaatttaagaaaaatgttacaaacagcattgaataaagcagaaaaatgttacaatacttgtatcaggagggtgaatccgatgctaaaaagagagatatcagagcgtttatattcatggaagaatgagaataagaagaaagcactgtgcgtgattggcgcaagacagattggcaaaacgacgattatcagagaatttgcccggaaagaatacgagtattttgttgaggtaaattttatattggataagggggccggtcagatatttgatggtaaattggatgcggatacaattatcgagaatctgacagcttttaagatgcagaaactggaacccggaaagactttgatttttctggatgaaatacaggagtgtccgaatgcccggtgtgccattaagttccttgtggaggatggaaggttcgattatatagaatcagactctttgctgggcgtcaagtataaagaagttccgtcttatgcagtggggtttgaagaaattgtttatatgtatcctatgaatttcagggagttccttggagcgaatggcgtacaggagacgacatttgcagctttgcagtcctgttatgaaaagcacgagaaagttccgcaggtaatgcacgaaacactgttaaaactatttgcggcctatattgtagttggcggtatgccggatgttgtccagacttatgttaatacccatgatattggaaaagttattcaggttcagagaaacattctggaattatacaggcaggacatagccaaatatgcagagggttcggataagaaaaaaataaaagcgattttcgacagcattgcctctcagttggatgataaaaacagacgatttgttctgaatcatattgatgaaaatggaagaatgaaccgttatgaatcaaaaaacaatcgtaaaaatttacgattgttttttggcgtttttgaacgcgtaattgtatgtgcgtatttttatatatgcatccttctccggacttcctccctcaaccggcttcgcagcaggatagtcaccagtgtcacgtcgatgataatagcgcaggtgaggacaatggcggaccaggaaagagccattggtacggcgtaataacggcgcgtcagcagttctacacagacagagtaaatgccgatttctgccacgaggatgacagcctgggaaagtatagagcttcttggatggcccatactgatggcgaagaagaaaactgccagtgtgcccagaataatcaggggcagggcgatagctgtgtaccagccgttgccgggatggagccaggcaatgataccgaagtacatggcgatgcccagaccgtccagaagcaacgtgattcgaaagacagccttggtcggaaagaaaatcggcaggcagaaaatccacaggacgatacaggtgccgatgacatagaaggaccagtgggaaaatgtgataaaaaaaaggttcaaaagtccgcagacaactgctgttgtggccagacagacggccatgagaatggcggtttccttgcggatgcctgaatccacatagcctttgtccacaggatagggctttggtgaaacggtatccaccggttggttgggattgataaccttggtattacacagcgggcagacggagcaggttttgtccagttccacaccgcagttgacacaatatgacattaaaattcactcctgttcatatcacggttggtttcaattttgacatgcaggccttcttggactaatttcctaaagaaaaagcgttccacgtcggtttcgataatagtacttgtaaagttgatgctcagggtatcgccgaaacttcctacagcgcaattggttctcagggagaaaggctgccccatcaatacgtcaaaataatcgacaaattcacgcatttcttccggcacatcaatgacacccagattcgtcaggccggcggtggactgtttgtcctgcacacggatataaaactgtttcacaacgatatctttgacaaaaagcggcacaatacggatcagcgggctctgctgggtagaggcgttggtggtaatgtcggcatttagaaacttgtcattaatgtaaaaacgcatgtagttgtggacatgggtgacgatttcctcaaaggtatagtctcccatgcgcgggtccacagaagggtaaaccatggcaataaaattccgcaatgtgtctgatggaaaaatattgcgcaaattcacgggaagcgccagtgccacgggatgttccctgaaaacatggtccgctttctgtttttctaataaagcatacagaagtaccgcattcaaatattccgtcagggttacatgataactgcgggctttctgcaggacttcctgtacagacagcaggccatggatgatattcagtgtgtaaaagggctccctgtggccgcggatgcggtaggctttgccctgactgcgggggcgtttgactctggaggaagcatatttgatataggcatcctccatttcctccggccgaggcggttcgttgatatccagaacgccgcaggtgttggaaatctcatgccctttcagacggagataaacggctgtgatggttttcagcagtttcagggcaccgctgccgtcggaaagagagtgaaagacttccagcgaaatccggcatctgtaatagtaaattcggattaaatatctgttgttagatttaaacaacattggcatgcagggattaatgatatccggcctcacaaagggaccgggatggtcattgggttccagataccgccagaaaatacccttatgaagggcaactttgaaggacggaaatctcggcaatgtcagatccacagccctctgcagtgtgtcagggtctatttcctcctttaaaacaaccgacagacggaacacattggagaagttccggcgctgaagggtcgggtagacattggcggataaatccagtttataccatgttttatgctgttttttttcggaatgattctcagatttattgattgttttcataatttttattataatgttactcatcatcaatagcaagagcaaatacgtatagatgtacaggaattaaatgtttcgcatatagagcgggaaggagaaagtgaatggcgataagtgaaaaatccaatcaagggctgatgaaagccattaaaagaatgcatacccttgtggagagtgatgaccttgagagagtccgggcgtcccaggagaatatcagcgccctgttgaagcatagagagttgaattatgagccttttcaggtgggggagattccgtcggaatgggtcagtgtgaagcgcagccatatgcggaagtttgtgattttctattgtcatggcggcggttacaatacaggcagctttcattatgccagaagcattaccaacaaattgtcgagtaccacttccatggatgtgctgagctttgactatcggctggcgccggaacatccttatccctcagccacggaggatgccatggcagtgtgggattatctaatgcatctgggttatggtgccagggatgtcattgtagccggggattctgccggaggcaatctggccctgtcccttgtcctgaagctgaaagagcagaaacgaattttgccaaggggactgattcttttttcaccgtggacagacctgacaggtagcggcaagtcttatgagacaaaggtggacgtggacccgatcctgaaccgggaatatctggacaatgccattgcagcctatgcttcaggacaggatttgaagaatccgttgatttccccgcttttcggcaatttcacaggtttcccgccaacttatatccaggtgggcagcaacgaactgcttttgtcagattcattattgctcaaaaaaaatctggaaaaataccatgtcccagtacgtcttgaagagtacaagggaatgtggcatgttttccagatgtcaccttttaaaactgcttatgatgctatggatcaggttgcggaatttatcttcgatatctgtcgttagtaccatcggacaagagctatctcctgtccgatacaggcggtttggcaaaagtgtatgcgcaaacaaattctgcggctaatctttgatagtgtgagcgtcgtctaacaaccggttcttcaggtcgtacagcttgcgggaaaggtccacatagacttcctggggattgatgagtcgtttggattcatcccagagagtggccttttcctgtgtgcagtaagcctgaatgtccataacagacggagattcatagacacactgaccgtttttgaatatcggaacaagcagttcacgaatcgtataagtgccggcttccagtcgggtacgcttccatgtggccagcggatcgaacagagtcagcggctgatcttctgtgaagacctcatcttccagggtgatcagatcggctttgatctttccgctggctttgtcatagatacgaagaattttcttgttgcccggatttgtgactttctcaacattctcggagactttgatcttcggtatttctgtgccgttttcaccgataatgcaggccagtttgtaaacaccgccgaaggatgggcagtctttggaggtgatcaggtttgtgccgacaccccatgaagtgatcttggccccctgattcatcagactattgatcaggtattcgtccagatcgctggatgcggagatgatagcatccgggaatccggcttcatccagcatgatacgggcttttttggtgagataagccaggtcaccgctgtcaagacggataccgaagagcttggagtggatacccttttcacgcatttccctaaagacctggatggcgtgtttgacaccggagttcagtgtgtcataggtgtccaccagcaacaagcagttgtccgggaagagttctgcatacgtccggaatgcttccagttcggatggaaagctcatgatccagctgtgggcatgggtacctttgaccggaatatcaaacatctgtccggccaggacgttgctggtgccgatgcatccggcgatcacggcggctcttgcaccgtagataccggcatccggaccctgggcacggcgaagaccgaactccatgactccgccgccagcttcctgaacgacacgggcggccttggtggcgatcaggctctggtgattgatgatgttcagcagagcggtctcaacaagctgggcttccatgattggcgcgatgactttgaccagcggttccttcgggaaaatgattgttccttcgggaatggcatagatatcacctgtaaaccgaaagtttttcagataatcaaggaaatcttcctggaaaaagccggtgcttctcagatagtcaatatcttcctgttcaaaatgcaggtctttgatgtaatcaatagcctggtcaagaccgcaggcaatggcataggcaccgccgcacggattctggcgataaaaaacatcaaagacaacatgttctttggagtgagttttaaagtagccctgcatcatggtcaattcatataaatctgtcaataaagtcaaatttctgctattcgtattcatatctcttcctctatttattcacatgctgcatgccaaaccgctttccgggatcaaagagagtgcggtgcagcaggatgcttatttattccagtaaccttcgtgaactttggcagcggcaggtgccagttcagggaaaggccctgtgacttcaatggccttctgacctttggcgaagacgtcgcggcaaggcagatcgaaggtcgggttctgaggatcggcacctgtcagggagagcagatccttctctgtcatagcatacacaacatggccgatgttgccccagtaaatggcaccggaacacatggcacaaggctctgccgttgtgtaaagtgtgcagtcccagagaaattctttgctgtaagcgtgggatgcacgttctaccagctgtgtctctgcatgaccggtacatttatgctctgttatctcattattcatctgttccataataatattcccgtctttatcaacaaggagagccgcaaaaggtgtattgccggattctcttgatttgacggataattcaattgcgcgttttaagtaagcttcatgtgactgcatgaggtacctcccgtattttattaattgaaattagtatactgcaatttcaggaaaaacgcaaattttgtactttttctagtccatttttggaaaaagatggcagataattaaacgaatataaatggaaaaagaaaggatatttggttataactggaatattattgaataattgcggaaatatttatgaatttttttgaaaattcatttgattttcctttggaaccgtgctatcatggcgacataatagattgctgtttggaacaggaccttatggatgtcaataccggacattttgtcaggcggattcgaacagctgccagacaatcaggaaagggcagggtgaatctacaggaagaaacgggtgaagtaaatgaaagggttagaggtgataggttcctatctggatgaatggaacatcgtgacgattaccgtcagattgattttggcggtcgtatgtggaggtgccatcggtctgaccagaagtgtcaagcgtcggggagcgggtttcaagactcatgctcttgtctgccttggctcggcactggtcatgatgacgggtcagtatatctatgtggacttcggtgccatatcagatattgcaagactggcggctcaggttatcagcggtgttggttttcttggggttggaacgatcatggtcacaagagataatcatgtcaaaggattaacaactgcagcagggttgtggacttgtgcaggcatcgggcttagtatcggcatcggcttttatagtggtgcagcgatcacgacgatcctggtactggtgatctatcggtttatgggaagggtcgatgagattgcctatgagcattcaagggttcttgatatttatattgaatttgaatcaagacgttcaatcgcgccatttatcagtgttctgaaacagaataactacaagatcgtgcagatggaactgaacaaatccaagaagaataaggaagagcttgtgaatgcgacactggtattggaagtaccggagaagacgaaacacgggattgtgatcgatcttctcagggaaattccgggaatagaatatgtagaggagatttaattttactgaagccggtttgaattgacaagctggtcaaagttttatcaattttttgaaattatcttgaattttacacattctttacaggaaatttactagtttgatgtttacagaatgacaaactcatggtatcattttgttaaaacataatgcttttaacgatgctatttgttaaaagtgcacaatttattctttatattcatccgcgggggagaacgcaggtggatatatctcaaaaaggaggagttaaagaatgaaaagatctaaaaagcttatgggcctgacagcagtcattatgggcgttgtgatggcaacagcagcctgcggcagttcaggcggcgcagctgagacaaaggcagctgattcagcagcttcaacggaagcagcaacagaagcagccggcggcgatacttctgcagcaggtgatctcaacagcaagaccgttgatgaactgacagaagcagccaaggcagaaggtgaagtcgtatctgttggtatgcctgatgaatgggcagactgggcatccctgtggaagacaatgtctgatacatacggcatttcccataacgatacagatatgagttcttctgaggaacttcagatgtttgcgacagaaggcgaaaagggaaccaaggatatcggtgatgttggttacggattcgcaggacaggctgtatctgaagatcttgttcagggttacaagacctcctattgggatagtgttcctgattgggcaaagggcgaagatggtaagtggatggttgcttacacaggtgtaacaacattccttgttaacacagatcaggttgataaagtgccgacatcatggcaggatatcaaagacggcgactacaaagttgcccttggacctctgacaggtggtaatgctcaggctgctttcatcgcttccgcatatgcattcggcggcgatatgaacaatctggatcctgctttcgagttctggacagaactggcgaaggaaggcagaatcaatacacttgatatcactcaggcgaacttcgaatccggtgaaatttctgttggtgttgtatggagcttcacaggtatcccttacagcaagaatatcagccagtacaagatgcaggccgttgttccttctgatggatgcttacagaatggttacgcttccgttatcaacaaatatgcacctcatccaaatgcagcagctctgacaagagagacaatgtttagtgatgaaggtcagacataccttgctctggcaggtgcaatccctacaagagaagacttcacaatcgcagacgaatacaaggatcaggttatctccaaggatgatattgccaatgcagttctgatcagcgatgcagatgcttattcagcagcatgtgaaacagctaagacacgttgggaagaagaggttgcgccattactggtacagtaatgcagaacagataatttcagtcgaagatgacatatggatattcggcttgaactgaatgaatttcagggggtgcaaagcctgcacccccgtttttcgattctatttaagtctcgcgcgcgcccgacttgaattgaataacagggtctgatgcacccgatgaatcagaagaacagcatcagacaggggttgaatttaatgaagaaaaagacatacatttatttacttgccctggttccattcctgattgtggctatgctctatgaaattgtacctttgatcacagtgatcgtgaagagttttcagccggatggtggaacaggtttcacacttgagaattatcagtctgttttctcgaagttgctttaccagaaggcgatcatcaacagtatcaagatttctctgacatctgctgttgccggtattatcattgctttcctgggtgcccgtgcggcacatcagcatcagggcaaactgaatcatgtttttatgacagttctgaatatggtatccaactttgcaggtattccgctggctttcgcttatatgattcttttgggcaatgccggactggtggtcaatatcggcaaggaattgggcatcaatgctttatccacatacaatctgtacacgatgaacggcatgagcctgatctatatttatttccagattccgctttccacacttcttctgatcccggcctttgacggtgtgcagaaacagtggaaggaggcctgtacattgctgggaggtacaccgggaatcttctggagaaaagtcggtatcccggtactgatgccgagtattctcggtacgttcagcgttttgtttgctaatgctctggcagcatacgcaacgatttacgcattgatgatggacaatatcgcacttctgccagttcagatcgcgggatgcttcacaggtgaagtcaagatccgtgcaggtctgggcggtgccttatctgttgtgatgatggcgatcatggttatcatgattctgatcaccaacggcctgagcagaagattccagaagggaggcaatagaaaatgaaaaagaaaagcgcaggatctgtagcgattatgctgcttgtcatgatctatctgctgatccctcttgtaatctctattatttattctgtattccataagtggacaggggttattcctgaaggatttacccttcacaactatgtggacctgtttacggacagcaatttccttgcatctgttggacgatctatcgcaatgagtattattccgattattgtgacgatcgtgatcgtccttctggcattatttgtaacggcgatttattttccgaaacttgagaaatatgtacagatcatctgtatgatcccttatacgattcagggtgttatcctttcagtcagtatcctgtctctgtatgtcggttccagttcgattctgagcaaccgtctggtcatgctgatgggtgcgtattgtatcgtgattctgccatatatctatcagggtatccgaaacggtatgcgtgcggtgaatatgccgacactgatcgaggcagcggagatgcttggtgcatccaagatctatgcatttttcagagttgtcgtaccgaatattctttcagcgattattgtatcgtcacttctggcagtcggcattatcttcggtgattatgtactgattcgaaatcttgccggaacatctgcgccgaacatgcagattttcctgtatcagacaatgaagagcgacagtacaaaggccagtgccgtattcgttgttatcatgtttgttacatttgtgatcacagccatcgttctgtttatgaagagccgtgaagcaaagggaaaaacacacagaaaataaaggagtgaggaaacatgtcatatattcgttttgaaaatattgtcaagagttttggcagtaataccgtattaaaagatatcaatcttgaggttgaaaagggacagctggtgacgctgcttggcccgtccggatgtggtaagagtacattgcttcgatgtctgtccggtcttgagacagtgacatccggtaaggtttatctggatgacaaggatatcaccgatgttaatccgaaggacagagatatcggtatggttttccagcagtacagtttattcccgaatatggatgtcgcacagaatgtggcatttggtctgaagatgaagaaagtgccgaatgcagagattgataaacgtgtcaaagagatggtagatatcgtgggcttatcggatcatctgcatcattatccatcagagctgtccggcggtcagcagcagagagcagcccttgcaagagctatggtgacgaacccgaaggtactccttctggatgaaccgttatcagccattgatgcccttttgagacattccctgcaggttgagatcagacgtattcagcaggaactgaatatgacagctatctttgttacccatgaccaggatgaagccatggttatgtccgatgtgatccatctgatgtacaacggcaagattgaacagtccgctacaccgacagagatgtatacagaacctgtttccaagtttgcagcaacattcatcggccattacaacatggtgccggttgatgcattcaagaagatgacaggcgttgacggtgaaggtacagacgtagcattccgtccggaagtcattgatatcagcacaaaacctgttgagagagaaggctgcgcgacaatcaagggacatgttgttgtcagtctgcctcatggcaatgttctgcgttatgccgttatgtgcggtgaccatcagattgatgtggatgttctgtttaagaaagcaactatcattccgaatggtacagatgtttatctgacattgaagcaggatgactgtattttcctttagaattgaatttgaaatccttattgcaaagcactcaaaacagattttggcattgcagctgtgagaataccagacggctgcagatggaggagaagaatgcagcaatacaattacatagacagcgcgtgggagaagaagagcagcgggatagacggccgataggggctgcctgtttcgctgcgctttttatgttggactgtggagaatgttttcacggcagctgtatttatgtaagtgtaagcaatttatcgcgcagataactgcattcagtgctgaaatatggtaaaatggaaagcaggagatgataaatatgactaagaattttgcgcaccgcggtttcagcggtaagtaccctgagaatacacttctggctttcagcaaagccattgaagaaggagtggacggtattgagaatgatgtccatctgactaaggacggcgttctggttgtcatgcatgatgaactggtagatcgtacaacgaatggcaagggctatatcaaggataagacttatgaagagctggcccagttggatgcttcttatattttcaaggagtatggacctcagaaagtgccgacactgagagagtatctggagctggtgaaggatacggatattatcacgaatattgagttgaaaaccggtgtctttgagtatacgggtattgagcagaaagtctatgacatgctcagagaattcgatatggtggaccgcattattatttcttccttcaatcattattcagtccttcgtatgaaagccattgacccggctatcaaatgcggtatgctggaggaatcctggctgatcaatgcgggagcatacgtggcttcaacaggtgtggaatgcttccatccgttcttcaagaacatgacgccagagaatgtggctgaggtgaaatctcacggactggagatcaatacatggacagtgaatgaagaagaagatatcagggagatgttcagagtcggtgtagattccgtcattggcaactatccggaccttgtgaacaagatcagaaacaatggctgataaaacagcaattttgagtgttggtatcgatgtaggtacttccactacccaggtggttttcagcaaactgcagatggacaatgcggggggatatttttcagttcccagagtggctattgtggacaaagaagtggtctataagagtgaagtctatatgacccctttgaagacagatgtgctgatcgatacggatgcccttcggaacattgtggctgccgaattccgtaaggccggttacaggccggaggatacggacagcggtgcagtgatcatcaccggcgagtctgcaaggaaggagaattccgatgcggtgctgaaaagtctgtcggattttgccggagattttgttgtttcggcagcagggccggatatggaatccctgattgcaggaaaaggcagcggagcctggcagtacagtatggaccatcattgccgggtagccaatctggatatcggcggcggcaccaccaacgtggttctcttcgaggacggagagaccctggccagaggctgtctggatatcggtggccggttaatctgcatgaacccacagggcatcattacgaaagtcagtccggcggcagcggtgatggcgcaggcggcaggcgtgtccgtttctgtaggagacagatgcgatgagttgaaattgacggcagtgacgcggcagatggcagcggcgctgaatgcgtatctgggagttggcaccaaagatattgatgcaattttaaggcaaattaaaaccccgggaagcagtgattttccggttccggagaaagtacaggcggtattcttttccggcggtgtggcggatctgatttaccatgagtctgcggatacatgggcttatggtgatatcggcgttctgctgggcagagccattcgggaaagtcgtttatttacggattttcaaaaaatggagccaggagagaccattcgtgccacggttgtgggtgccgggacatatacaacgacgatttcagggagtaccattacttattccgatgatatttttccattgaaaaatattccggtgatcaagctggatgaagaattgcaggaagcctgctttgccggtgagacagaacctgttatccggcggattcagtgggtattgggacagaatgatgaggaacactttattttggcgatgcccggcaagagaaacccgggatatatggaaatgaagcgggccgcagcatcgattcggcagattatggacagggtgcagccgccgggggaaccgattcttctggtgatagagagtgatattgccaaggccatggggcagatgatccggcagcagccggatttgaagcgtcaggtggtggccattgacagtattcatgtggaagacggtgaatatgtggatatgggaaagccgatgatgaacggcatggtcattcctgtggtagtgaaaacattaatttttggataaaagaaagagggtgatggagtgaaattggcaacagtgctttcggggcaggcatttatttttcgttccctgaaagaggttctggcaaaggccaatgagctgaaatccggcgatgtgctggccggtgtagcggcatcctcggatttggagagaattgcggcgaaggaagtgctcagtcagctgcttttatcagatttgcgcaatcatccggttgttccctatgaagaggacgaagtaaccaggattaatcaggatggaattgatgagacagtttatcagcgcatcaaaaactggacggtggctgagctgagagaatatatcctcagccatgagactacggaagacgacattcatctgttgagcaaaggtcttaccagtgagatggtggcggcggtctgcaagctgatgaccaatatggatctggtgtatggggccagtaaagtgcgtgtgccggctcactgcaataccactatcggtcttcggggtacattggcgacacgacttcagccaaatcattccacggacaatgtggagggtatcacggcatcattatttgaaggcctcagttacggttgcggggatgcactgattggtctgaatccggtcaatgatacggtttccagtctttcagaggtgctgaagcgttttgatgaagtgaagaaccgttttgagattccgacacagatttgtgtgctgggacatattacaactcagattgaagccgtcaaaaacggtgctccggcggatatgatctttcagtctattgccggaagtgaaaaaggcaacagagcttttggttttagtgctgagacggtggaagaagccatggcacttctgaaggaaaaaggtaccggagaagggccggatgtaatgtattttgagacaggacagggctcagaattgtcatctgatgcccattatggcgccgatcaggtaacgatggaggccagatgctatggctttgccagagcgtatcatccctttatggttaatactgtcgttggttttatcgggccggaatatctttatgacagccgtcaggtgatccgtgccggactggaagaccattttatgggaaaactgacaggtattccgatgggatgtgactgctgttacaccaatcatatgcaggctgaccagaatgatattgagaatttgtccatgttgctggcatcggccggggttaattatattctcggtgtgcctaccagcgatgatgtcatgctgaattatcagacgaatgcctaccacgatgtgtctactattcgtgagattctagggcttcgtccgattaaagaatttgaccagtggctggaaaagatgggtattagtgaaaatggcaagctgacaaaatatgccggcgacccgactttatttacaaagaggggaggcggtatctgatgaatatagatgaagcgttgattgaacggattatccgtgaagttgtttcacaggttgtggctgagaaagcggccgggggcggacagaatcgctctgcttcaggaaataatcagaacagcatgcaatcagtgaatttgggacagattgaacagctggtgaaaaatgttgcttccggtgatagacaaacatcatctggtggacaaacatcgaatgccggtggatatcatccagaagagccagttcatgatgtggatatcgaggaagatattacttcccgtgaagtgaagaaacgtccactgatcgatcagcctcaggacccggaggcgttggaaaggatgatgcgtctgacaacagcccgcatcggtgttggctgtgctggaccaaggctgaagacccagacgctgctgactctcagggcagatcatgccagagcaagggatgcggttatgctggatgtgcatcaggatgttattgacaatctgaaacttttcagtgtccagacccgttgtcaggacaagaatgaattcctgacccggccggatctgggacgaagactcagtgaagatggggttcagaaagtcaaagaccagtgtatcgaaggaccggatgtgcagctgattgtggcagatggcctaagttccaccgctattaatgccaacattgaaaatgtgctgccggtgctaatggatggtctttctgctgcaggattgagagttggaacaccattttttgtccgttatggtcgtgtggctgtggaggatgagattgcagagcttgtgggggcaaaggtagtctgcattttcgtgggtgagcgtccgggacttggaacggcggagagtatgagtgcgtatctggcctacaatgcgaaaattggtatgccggaggcacgcagaaccgttgtttccaatatccataaagacggtatcacggctgtagaggccggtgcttatctgacggatcttattcagaagattctggataagaaggccagcggcgttgagttacagaattaggcagggggaatacatatgaaaaatgatccgatcaggacaaaggtgctgagtatcaggctgattcccaatgctgacagatttctgctgaaggcgatgcaggtgcaggaagggcatagaagtcttggcctgatcacaacggactgtgatgatgtttcctatgcggctcttgatgaagcgaccaagaaggcagacgtgtcggtggcctatgcaaggagcatgtacgccggttcatccaatgccagtacggctcttgccggtgagtttatcggtattctgtccggtgagaattcggaggatgtgaaaagcgggctggcggcagccgtcagttacatagaaaatgatgcctgtttttacagtgccaataatgatgacagtattgtttattttgcccagtgcatatcaaggaccggcagttatctgtcggagatggccggtgtgccggaaggaacggcaatggcttatctgatcgcaccgccgttggaagcggtgacgggactggatgcggcgttgaaagcggcagatgtggaaatgaacctgttctatgggccgcctacagagaccaactttgccggaggactgctgacaggtgatcaggcagcgtgtcgggcggcctgtgaagcatttcgtgaaaccatatgcaggattgcagagcatcctgttgaaaacatagattaagagacttttggaaaagaaggtgaaacagagtggattttgataaggacctccaatcgattcaggaagtgagatggcttgttgcgaaggcagttgtagctcagaaagagctggcaaagatgtcacagcagcaggtggatgggattgcaaaggcgattgctgatgcctgtgcggctcagtcggagcgtctggcgaagatggccgtggaggaaaccggatttggtatatggcaggataaggtattgaaaaatctgcttggttcggcgattacatgggatagtgtcaaggacatgaaaactgtgggtatcatcaaagatgacaggcagaatgggctgatggaagtcggcgtaccgatgggagttgtggcagcattgatcccatccacgaatccgacatccacaacgatgtacaagtcgattatttcaatcaaagcgggcaatgccattgtcatcagtccgcatccgaatgccaagaattgtattattgagactgcaaaggtcatttgtgaagcagccagaaaagccggtgcgccggagggtattgtgcagtgcatcacattgccgaccatggaagccacagatgcactcctgaagaacagaaatatcggtattattctggcaacaggcggcgaagccatggtgcgtgcagcttacagttcaggtaatccggcccttggcgttggcccgggcaacggtcctgcttttattgaaaagtcagcgaatatccctgtggctgtcaagcgtattatggacagcaagacatttgataatggtacgatctgtgcatcagagcagagtattattacggagcgttgcattgagcagaaggtggtggatgaagtcagccgtcagggcggttactttatgacaccggaagaatctgagaaattgtccaaatttatcctcagagctaatggcaccatgaatccgaagattgtcggaaagagtgcgcagacactggcagatatggcgggcatccgtattcctgccggtacaagagtactggtttcaagacagagaaccgtgggtaaggacaatccttattccagagaaaaactttgtccgattctggcgttttatgtggaggacggatgggaagaagcctgccgtcgttccattgaaattttaaataacgaaggtgccggtcatacaatgaccattcacagtgaagatgcagatgttatccgtgaatttgcccttcagaaaccggtgtccagactgcttgtgaatacaccgggagctcttggcggtgtcggtgcaacaaccggtcttcagccagcattaacgctgggctgcggttctgtcggcggcagtgccacatcagataatgtcagcccgctgaatctgatcaacagacgccgggtggcatggggactttgtgaactggaagatctgagaaaacagcaggagcagatgacaggcgtatctgctgcaccacagagtacttttggttcaggcagtcatgcaggaggcagctgtggacagagttctgtatttggcagtggttctaatgccggagcagcctgcggtaattccaataatggagcggcttgcggcagtccggagattacggaagacgatatcgccagaattacaaaggcagtacttcagaaactgggcgcattaaattaaaacggcaccaaaggtgcgaatcatgatataatgagcgttagtgagcgggagcaagcaatgcttgctcatcgcgaacggcgaatggcgatcatgatataatgaaaacaattaaattcgggattttcccgcagaattacggaggtaaatattatggcagacagattattagcattaggtatgattgaaacaaaaggtcttgtaggttctattgaagcagcagatgcaatggttaaagcagcgaatgtcaacttaatcggcaaggtacatgttggcggcggtcttgtaactgttatggtaagaggcgatgtaggtgctgttaaggcagcaacagatgcaggtgcagcagcagcttcccgtgtcggtgaacttgtttctgtacatgtcatcccaagaccacacgaagagatcgaatacattctgccgacactgacaacttctgacagataggacaggcttttggcctgacagcaggtgagcatagatggagattttaacagatattgcgctgcgggcccactggttccgcagccatgagaaagcgtaccatgtatcaaaggatacgatgctgacgcctgcagcgagagattttatcagagaacacggaatcacgcttatatatgaagattcagcgttggaaggacagccggaagttgaagtttcctctgtaccggaatcagttaaggcagtgaatcagctgccggatgcggcggaatctgttggtgagccgtataaggccatgcccatggcggctgttccgcagggagccgaccataagccgcagtatgtcaatggagagacaggagaagttctcagcgtgaagcctgagaatatgacccatcttcatggcaatgttcttgtaccgaagacccatccgcaaattgcttttcgcgggatgctggacagcctggaagcgaagattatgtctttgcaggtggtggcttctgagaatggattgcatcgactgacagatgcactggatgaagtgttggcatatgtacgccggattctcagtgcagaagttttggacaaggaactcggagagatccatctgcttggtttggacagtgcgggactgcgttatgagtcccatcatatcaaggagatttatggcattccgcatccgatgccggaatacagaatgggtcggatatgtatcggtctgaatgagcttagaacttttgtcagagagacagaattggcggcggccagagctttccagtccggggatacatgtacacggccggatattgtggaagccatgaatcggctcagcagtgtcatttatattctgttctgcaggcagctgacgggcaggtggcccggtcagcaggagccgtcagagatgaaagatcttccgggatttcttgtggaagcatccgggcgtcatgtgcatctgacgcagcaggcgattgatgtgcttttcggggagaatctgcatgagaagagtcccctcagccagccgggacagtatgcatccgaagaacgtgtccgtctggtgacagccaagggtgagattgacaatgtggttgttctgggaccgccgagaggtgctgttcaggtggagatgtctctgacagatgccagaatcctcggtattacgatacctgtgaatctttccggtgatctaaagggggccgcagacgtgatacttgtgggaccgaagggtatttacaatgctgtgggttccgtcattgcatccaaggcacatattcatatgacaccggaggatgccagattatacggtgttgaagatggggacagtgtggctgtacgattggagacagagcgtccggtgacgattgatgatgtgattatccgtgtcagtgagaaattctcgttggcgatgcatatggattatgatgaagccaatgcctgctcctacaagaagggtgacatgggctatattatcaagaagaattaggaaaattcagaggcgttgtttcaggagaatgtctttggatatctatagatgaaacacccgctttaggggaggtttttgagaaaatggatgaaaagttaatgaagcagattgtggaggctgtcatgcaggaattgatggcacagcggtcgaatgcttcggcatgcacggaagggctggacaagcttctggtgatcggtgatctgcaggcagtgcctgcggatatggctgagaagtaccagattttcctgattgacgactatattcagaacaagaatattcatcgttatcagaagatcctgatcaccagcctgacattggtgcagatgtccgatattgctcaggggagagacggttcgccggaggcttgtgcagtgattcgtggacttctgaatggtttagatgtgtgcatggcagaagcggcttttccacataggaaatatgcaggaaagagcagcagccgtctgtatgaagtcattgagaataatgcgcggatgttgcagtcctttggcattaagctgttgaaagaatgcaaagttggagtacctccaataccggcgaagcctccaaagtatcaggcaccgccgatcgaagtaccaaggggcaccggccatacgacaacagatcgactgatcacagaggatgttgcccgttctttaattgacggcgggaatacggcaatctgtctggcagccaatgccatcgttacaccgtctgcctgggatttgtttaggcagaaaggtattgaagttattagaaagtagtctgaacaggattgttttagaagtattgatttttagacagggtgcagcctgagaagctgcaccgtttgaaaaggggagcacggaatgctgatatgtaaagttgtcggtcatgtatgggcgacgaagaaggaagagggcttagagggcctgaaactgatggtcgtacaggaaatcgacggtaccggaagaaagaaaggcaatacttttgtggctgcagatgtagtcggggccggtatcggagaacaggtgctgactgtcagcggcagtacggcacgaaaggcttttggaagagatacagtgccggtggatgctgcgattgtggccattatcgatactgttgaagtgaatcgggaagctgccaggggcagtgaatagaggtgcatgcataagtggatctgataaaacaaatatttgacagcggcgttgtgggatgcggcggtgcaggttttccaacccatgtgaaactgaaggcatcaccggaaatcctgattatcaatggagcggaatgtgaaccactgctgagaacagaccgatatctgatgattcatgaggctgagaagctggtgtcaggagtggacttgatctgtcatgaattgtcgatacctgaaggcaggattgccttgaaaaagacatataccaaagaaatcgaagcactgacagcagctattgagaagctgcattcgaaggtgcagctgcatctgatggatagtttttatccggcgggtgatgagcaggtggttgtttatgaagtaactggcaaggtggttcctcctgcaggaattccgctggatgtgggtgctattgttgataacgtggcaactattattgccgtagctgatgcagtgagtggtataccttttacggagaaatatcttactgtgacaggagaagtcagggagccgtcggttctgaaagtgccggtgggaacttcctttgcccagtgtattgagatggcaggcggaacgacatcggacaaagtgatggttgtttccggcggtccgatgatgggggcaccgatgtcctgggaagcagccatgaatgcgtctgtgacaaagacaacttccggcattctggttcttccggaggatggcgctattgaccgacgcaggaaaacacagctgaatcatatgctgaaccgggcgaaagctgcctgcattcagtgcacattctgtacgcagctctgtccgagacatatgttgggacatccgctgcagccgcaccgcattatgcggaaaatggctatgaacatgccgcatcaggataataatgagacgacaaaagaccactggattttgccggaacttctggaggacaaggatatccggcaggcagccatctgcagtgagtgtggtgtctgtgaagtttatgcctgtccgatggggcttcagccgagagtggtcaacagtctgatcaaaggtgagctggcgcaggcagggatccgctacagcagagagggcgatacctgggaggcagatgctaaccggccataccgtaaggtgccgacgaagcggattgcggccagagccggtgttggtgattattatcatattgatggacatacatataaggaagaaacggcttcaaaagttgtacttccgttgaagatgaacatcggtgtaccggctgaacctgtgatttcagatggtgcacatgttgaaaaagggcagctcattgcagcctgtccggagggcaaattaggtgcaaatctccatgccagtatttcaggaactgcgcatttgacgggaaatgccattacaataacagaggtgtaggcagatgttagaaacaataggatttttggaattgaatagtatcgctaaaggcgtagaagctgccgacctcattttgaaaacagctgaggtagatttgatttttgccaaagccggatgcccgggtaaatactacattctttttaccggggaagtggcagcagtcaaagcatcactggatgcaggtgcggctatcggcggtaatcatactgtagacagctgtgtcattccgagggtacatccccaggtcatcaaagccattaatctggcagcagaaccgggaacgccgggagctatcggcgttatggaatttttcagcgtgacagcttctgtttatgcggcagatgcggcagtcaaagcagctgatgtggacttaatcgatgtccggttgggaacaggtatcggcgggaaatccttcgtcgtactgacgggagaagtcgcggcagttcgagaagccatcgaatgcggtattcatacggagaacgcagaaggaatggaagtatcacacgtggtgattccaaacccacgcaaagaaattttcgattcgcttttataggggaccatggccgctcaggaggctgagaacacagcttatggcatcatatactttttgcacatcactgcacaaggacgttccgatgagccccgaacaaaatcgtgttcagcaaaggcttccacgatttggatctcatctccacagtgcagaatatgtacagaaagtatatgtgccataagccgtgtatccaggtgtattgagtggcgaatacacccttataaaagagaatctgttggtagaatgagttgtggtctgcggatagcagttttggatgttacaatttgtaatacatacgagattcattgctcacaacgtccgagagaggtataaaatggaacaggaaaaacaaagaattattcaggagtttgtgcctggtaaacaggtgactttggcgcatgtgattgcgaatcctgacagcagtttatataagaagctgggtgttatcggtgattataccggagcgcttggcattatgacgatcacacccagtgaaggtgcgattatcggtgccgatgtggcgatgaaggctgccaatgtggaggttgtatttgtggaccgtttcaacggttctctgattatcaacggaacggtggctgatgtggaggcagcggtgaaagatgtattaaatgttcttgagaatacactgcattttgcgccgacagtgattacgaagtcgtaaatcaggtgaggatatgaagaaaattattttaatcggcaatgtggcctgcggcaaaacgacgatttgccagtatctgaaccacatggaaatcaaatacaaaaagacacaggcgctggaggtctataacacgaccattgatacgccgggggaatatcttgagaatcgcggttatctgcggtcgctgatggtaacagctacagagacagatcaagttgtttttgtgcaggacgccagcagagatcagttctttttctcaccgggacaatccagcgcttttacattgcctgtagccggggttgtgacaaaaatcgatatcgcgacaccaaaacaaattgcggatgcagttgaattgcttcaattggccggagcggatccgattttcaaagtcagcccgatgacgggtgaaggtatggaagaactggtggcttttctggaggagaaagaggctgcagcggaagcatgataaaaaagaaaatcatgcattaaatggaaaataatgtaaaaaagaaaaaatatattacaaaaccgatgtatagcagaacacttctgtatagcattgtaaacgtaactgtcgaaatttgttatgatgaatgcagaggtgattcgaatgaagaatgagaatgaacgatttgtagaaatgggaaaaagaatcaaggcgagaagggtaagcctgggaatgaaacagatggagttggcggaacggatagatatatccaacaatcatatttcatccatcgagagaggaattgaacgtcccggtcttgaatcttttatcaggatatgtgatgtattggatgtgacaccggattatttattgcttggttcaatgaaagccaatgatataccaaagaacattacagataatctgaagttgtgtacagatgaagaagttcgttttgtggaagcgatgacgcagtatatgattgagcagcataaaaaataagtaagctatgaacattttagtggcgtaatgtagaaataattgaacaacacagatgaaaagactgctactttattgaaaaacaggattcatttatatatgtatcatgagaatttgataaagtagcagtcttttgtgtttttaaatgctggaagtggaatttgtaaaggaagtaataatgcgcctttgccaattatttctattgtttcgtgtcggcgtggagagtataatagagttacaggattcctcttgcaagtttatgtgggaggaaatagatgagaaaaagactacaagacttaacgattaaagatgcctttatgtttgcggcagtgatgtcgaatgcagagcagtgccgccacctgctagaattggtactggaaatgaaaattctggaagtaaatgttgtggctgagaagaccatcagttatcatccggagtatcatggtgtgagattagatgtcatggcagaagaagctggaacaaaacgccgatttaatgttgagatgcaggtgaagacagagagtgccctggcaaagcggagcagatactatcatgcgcagatggacatggatgccctgttggctggtgaaagttacgataaattgccggatacatatgttatctttatctgcgattttgcaccatttgatagtcgtttgtatcggtacaatatccgcaatgtagttcgtgagacaaacgaattattgaaggatggtaatcagacaattatcttgagtacacaaggaacgaatccatcggaagtaccggtggaattggtgaattttctgaaatatgttggtcaggatacggatgaagcagaaacgaatgatgattatgtaagattattgcaggaacagataaaacgcataaaacaaaaccgtgactgggaggggaagtatatgctgttagaagagatgatgcgcgatgagcgagaagaaggcagacaggaaggtcaggagcgaatgagtcagttgattttgttgttgttaaaacaaaatagaaatgaagatatcgcaaaagcagctgcagacagagattatcaggagcagctattcaaggagtttaacttgtaaagggatactgtgcgagtatctgatgaatgaagaagaattacttgaggataaaagataaaattactataattaaggcggagaaggatataatgcaaattaactaaggaggcgatgcggatgaagtctttcaaaactttacgaatggtgataacgattgtggatgtggtgtgtttattggccgtgttgcttgttccggctcttgaggtagcgaagcataatttctttgtctggctgattcttggacttctgacgttgtatgttctctttatgtggatggtgttaggcagaagaaacaccaacggttatgatgcagagagtgaccgtgaggcggatatttcgaaggaattactttctcagaggaataagtggtatatgtagagcctattcgatgactatatgagattgttacagggaaaaataaggtgtatcaaaccatagttggaagagaaaataacaattgaatagtgcaaataagaagactgctgttttattggaactcaaagtgcatttaaagatgtatgatgagattttaataggacagcagttttttgtgttgacatcttttttaagcaggatttgcagtaggagaatttgttggaattcatataattttatggcatgataagttgtaaaatgtaaaaaaatatgtgacgatttgtgctggaaatgcatctaataggtatgagatgtgtggaaactaagataggcagagtatttttgtagcaagcgggaggataaatattatgaacagaaaaatcataggaattttgggattagtaggtttagtgctgacaggctgtgcggcaccagaagtggaaacagagcaaacaatgatgggttcttacagctcagatgaaattatgcaagataatggccggaaaatagaaaagcattttcaaaatgaaggagaagatggcgtgcttgatataaatgctgttgtggatattccggatatatcgttgaaagaaggcgttatacaaagtaaagaatgggatatttccatgttggaaaatatgctgtgtccagggacagatatgactttggaacagaacagtcaaagcgactatacacgttatattggtggagctgcttataatgatttggattatgatacatattttgaaatttcaaaattagataattcattgacgtattgtaattataagttagatgattattttgttaatgaggcgtttgaattagtaaaggaggcggattggacagaatcagagcaaaagtttgtaaagaaaatggaagaaaatagtttagatttgtattcaaaattggggatagaagcagaagttgcaaatacagatttaacagtttcaaatgaaaaacagtattgcagtgtaaaaatgttaagaactttagatgggtgttcttggctggatgcaggcggagagcctgtttgtgatacgatacaaatagcagaaccggggattaatgttttgtcagtagcagaacaatatacgacaaaggatgttaaagaggcaagcgtattatctattgatgaaatcatgcagattattgatgatggggtaaagaacggaaatattcacacatatataatggaagaaaaaggatttgattatacaatacaatccatacggatgggatatatgacacaaatagaagatggagcaatgcactttttcccagtatggtattttcaatgtaaattaggtgaaaaaggtatcacattactggcattggatgcaagaaatggtgctgttatttatatgggataaagaaggatataataaacaatgaaaaaaataatgttaaaaagatcaatattaaatatccgaatgctgtttgttattgttgtcaattttgccattttatttgtgagtctgtttgaatatgggattataacagcggatgggaagactccggggagtacatatgatattttgacaatgtatacaattccttttgccatttcttcatttattatatttgcagggatatttccggggctgccatatgcgtttagttatttagaagaacgtaatagcggatatttgaagtatattcggacaagaattaatataggaaagtatgcaaaatataaagtgctttttagtggattgtcaggtggattatctgttatgattcctggggttatgatttttgcagttatttgtttgattgggcgaaaagtcattcctggtgataatggccatatatttaaacaattgatgtgggcaccgtacatgtatatttggggtggtcgttttgtgttgttgttaaaagcaatattattgtttttatttggtgcaatgtgggccgaattagctttattattttcaaatatttttaaaaatcgatatgtggcctatgttttaccctttttagcctatgaattaatgtggttagtatttcctgttggaatatggaatcccgtataccttgtcagaagtgattttggtcgtaatattccggtatttataccatatttaatagatattgggtatattgtaatattatgtataatcaatatggtgttaatgaagcggagggggcggcaatgaatataaatttccgtcaaataatacttgttttattggggcagctacgagctgctttgatgtcgaaaagagttttgattggatatttgattggagtaatggcggcattaaaggcggcgtatttgtatggagggtatgcgtcgaatcatccaatccaaatatttgaaccatggctgatgaattttagaagtcttgctgatattacaattatgttagttggatttattcttgttgtggcagatgctccttttgtagattcaaggtcacttttgacaatataccgcacttcgagaggaaattggtatgatgggctgtgtttgtatgttttagtgcagggaattatctattttgcactatcattgacggcaagctgtatttatacgattcctcatggttatattcaaaatcaatggagtgtggcaatgaagcaattagttttgtggccgtcggacaaagcaatcataacatggcatcttgttgcaccggataaaactttgattgaaggggttcttccgtgggaatcggtttttcatacatttttgttgatgcttttgtacagtctggtgcttggaatgctattatatgtactcaatgctggaataaacaaggcaataggaaccatcgcggcagcagctgttcatgtaagcggcataattttaatgaatctaaatgtttcatataagattacaaggtggtcattgctgaaaaacagtagctatctttggcattttgaggcaaaacttgatttagtgttttcatatgctctctttttattgtgttatgtctgcattttgtttattggtccgataatattaaaacatgcggatttcaggtattcagtaggtgaagaaaatgactaagaaatatcgatggattttcggcatactaatcacaatatgtatgagtataattttaattttgatttcaagtattgctttagattatcatagaaatgtctggcgttatcttggaggacctgtgagtgatggtattgttcctcagaaggtgattgagtggctgttgatagtgacgccggtttggacaatatgtggttggtggctaaataatcaattctcacttgttcaaatgacagtgtttcgatatgggaatataggtgtatggtggaaacagcagataaaggaagtgtacttattacatagctggtattatattttaatgtttgtggttttgaaattgagaatacagaaatattggacggctaatttatatttagagattttaatgattttgatacattcactttttatgttaacaataatgattttagtaagaattgttgttaataatatgctggcttcttttacttgtattttgatgttagaaattttgagcatttatgcttcagcacaaaaatggtttagtccaaaatactgtccatttgtctgggggatgtacaatacaagtaatcagacatatccaaataaagggtatgatatagaaaaagctattgtgttgtcagttgtttttattatagtattaaatgctgcgatttttgtggataagaagttgctgaaaaggagtttgagccatggaaaaaatagaactgataggagtgaataagtcttttaaagaggaaaaagtattaaaagatatttgtttaacattaactgacgataaaatttacggttttgttggaaggaatggttctggaaaatcggtcttatttaagattatttgtgggtacgtgatagcggacagtggaaaaattatgatagatggtaaagaacttggaaaggatatagatttcccggaagaattaggggctttaattgaaacacctggatttatctggtatcaaagtgggttcgaaaacttacgttatctggctcgtatcagaaataaaattagtgattcacaggtaaaggatgcaatacgtcaagttgggctgaatccggacagtaagaaatgggtagggaaatattccatggggatgaagcagagactgggaattgctcaagcgattatggaaaatccagatattttagttttggatgagccgatgaatgcattagatgaggaaggcgttgaggaaattaggcagcttttgttgaaatatcgacagctggggagatgtattctcattacaagccataatagggaggatattgaaatattatgtgatgaggtatttgaaataaaaagcggtgtattgcaataatgttttttgttgcataggaaattgcgtcctatgcaacaaaaaatgcgtcgaccgaaacggagtgaagatgcacttatgatgcgcccttctgatatcctattcatacaaacactttcgaacatattatgagaagaaaggggcagtgggtatgagaaaatcagggaatttatggttggctatgatcgcagcattgatactggtatgtgttatggcgatagcaggatgcggtaagcagcaggcgggcgcaggatcaggttcagagcaaagtgcacaaagtgccctggaacatgtgctgagctgtatagttcaggaggctgctgattttgagacggcatcggaagaaattaaacaggcagcagaggaaactggggatgagacagggattgtttctgtagatggactggaaacttattttcaggggagattcggggatgatctgactgaagattgtctgaacaagatgatggcggatcgtaccattgcagtgagtatcaaactggcagagcagtatcagtcagatattctggcagaggacattcaattgacgaagagatcaggcaacgaagatatgtatgatttcgaagcaaagttggggacagcagctgacagtaagaagattgcatcagtgacaggcgttgtcacgatggaggagagtcagtcatcctggaagatttctaatctgacagtaaaggtaacggagttataaattaatgatggagattaataaagctggccggattggctggctttatttatgtaaataacaaacaaaagtcaatacctggaagagacgttttcatgtttttgaagctatcaatgtgtaatgtaatacaataaatgtgctagagtcgtttataaatgttcctattgagtatacaaacatcccatgatacactaattatatgggaagtcagaatgcaaaaggcggttaaccctcttattttcggagggcgtaccctccggacgtaaggaaggaggggatgacgatggttacatatcaagatttaattgattttgcgatacttattgtcactcttgtgggtctctgctatgagattttcaagaataaaaaatagccgccactactcacactagtgacggctggcctttgttaaaggctggtaacccattacgagggtagaccgtatctggctttccctactatatatttactatagcatatggtgtgtcaatatgcaagatgtcattggcggttttattaaggaggcgatgcagatgaagtctttcaaaactttacgaatggtgataacgattgtggatgtggtgtgtttattggccgtgttatttgttccggctcttgaggcagcgaagcataacttctttgtctggctgattattggacttctgacgttgtatgttctctttatgtggctggtgttaggcagaagaaacaccaacggttatgatgcggagagtgaccgtgaggcggatatttcgaaggaattactttctcagaggaataagtggtactggtaataagataagcgtgtaagaaacagcacaataaaaaataataaataaaataaaacaggcgtatgaataatgtgatgtgagaaggttcatacgcctgttctttaataaggtaggaatttactaagcaaaatatgctttgttaatgaagtattttgttttacagatggaatcttgttcctgttttgccctggataccgtctttggatttctccagaagtgtgatcagagctgtacggccttccttggaggaagcgaagtcaacggctgcctgtacttttggcagcatggagccaggtgcgaaatgaccttcttccatgtatttctttgcttcttcaactgtcagatcctcaagccactgttcgtttggtttgccgaagttgatggcaaccttttcaacagctgtgagaatgatgaggaagtctgcatccagttcctgagccagaagacagcttgcgaagtctttgtcgataactgcgctggcgccctttaagtggttgccctgacgggtaacaggaataccgccgccgccgcaggcgataaccaggtctccggattcaaccattgtacggatagtaccgatttcaatgatttctgcaggttttggagaagcaacaacacggcgatagcctctgccggcatcttctttcatgatgtagccgtatttttcttccatcatcttcgcctgttcttcgttgaagaacttgccgatcggtttggatggattgttgaaagcaggatcatcttcattgacacgaacctgtgtgatcatggttgcaacagggatatctgtgataccgcggttgaacagctcttcacgcagggcgttctgaaggtcgtatccgatgtaagcctggctcatggcaacacagacagataatggtgtgtttggctgctgtgcatcttcatgtgtcagtgcgatcatcgcattgttgatcataccaacctgtgggccattgccgtgtgtaacaacaacttcacagccttcttcgattaaatctacaatagctttggaagttacttttacagctgccatctgctccggcagtgtattccccagtgcattgccgccaagtgcgataacgattcttttcttcttattcattctaaatatttcccccaaaataaacaaaataacggtttttgcgatttatataaggcggaggtgaatccccgccttatatgttaagttgttaagttaaatttaatcttatttgaagattctaggcatagatctttcttcgagtttcttcaggatttcctgtggattttcgaatttagcaaggaagatcatagctgcgatgatgtatggtttgtagcttgcttctttgtaaagaggatctctgtaacgatcgaatacggaagcatcaacttcaccttcttcacagcttacgcctgtgatgtcagctggcaggcagtgcaggtaaagtgctttgccgttctttgttgtagccataagttcttctgtacaagcccagtctttgtgttctgcgttctgagcaaggagttctttttcaagagctttgataccttctgtatcgccgttgccgtagagttctgtacgtttttccatagcagcgaaaggagcccagctctttggatatacgatatcagcatctttgaatgcttctgccatgttgtttgtctttgtgaaggaaccgccggatttcttagcgttttcagctgcaacagcttcaacttctgggaatacttcatagccttccggatgagcaagtacaacgtccataccgaaacgagtcatcagaccgatgataccctgaggaacggagagaggtttgccataagatggagagtaagcccaggacatagcgatctttttgcctttaaggttttcaacaccgccgaattcatggatgatgtgaagcatatcagccatagcctgtgtaggatggtcgatatcgcactgaaggttaaccagagtaggtttctgctcaaggataccgtctttgttgccctgtgttacagcgtcaacaacttcatgcatgtatttgttgcctttgccgatgtacatatcatcacggataccgataacgtcagccatgaaggagatcatgttagctgtttcacgaactgtttcgccgtgagcaacctgagatttgccttcatccagatcctgaacttcaagaccaagaaggttacatgcggaagcaaaggagaaacgtgtacgtgtagagttatcacggaataaagaaataccaagaccactttcgaatacctttgtggagatgttgttctctctcatgtaacgaagcgcatcagcaactgtgaaaacagcttcaagttcgtcgtctgatttttcccatgtcaggaagaagtcaccgttgtacatttctttgaagttaagtgcgtttaatttgtcgatataagcctgtaatttagcatccattataataatcctccgtttgattaagtgccgtgcaccggttaaaaattgtccgatgcacggaagttttattgttttataatacgttaacttttatagtatagtcttttttgaaattattcgcaataggacattggcagagcagcgtaaacagcagcacatgtaaccagatcctgtttccatgtcatttcgttaggagcgtgagcctgagcttctgcacctggtccaaaaccgatacatgggataccgtttctacccatgatagaaacaccgtttgtggagaatgtccacttatctgtcagtgggcgagcctgacgcatttcaagtgtgtcagcagcaccgattctcttatcaccgtaaagaccatggtaagcagcttccagtgcttttgtaaccttgtgatcctttggaatcgcccatgttgggaagtagcattcgatttcatatacacagcctgtgtaggatggacggtcatagttgtacatggaaacaacaacgtcatcaccgtatttctttacgctaggcaggttgcggatttcatccagacagctttcccatgtctcgccgaatgtcatacgacggtcaagagatactgcacaggagtcagcaactgcacaacggcttggggatgtgtagaagatctgagatgttgtaactgtaccgcggccaaggaagcgagcttcttcccagtcagggttgtatttaggattcagcatcttaacaagacctttgatctctgtttcgtctgcatcatcattttcattcagcgcacgaacatcctgaaggatatcagccatcttgtagattgcgttgtcaccacgttctggagcagaaccatggcaggaaacacccttaacatcgatacggatttccatacgtccgcgctgacctctgtagataccgccgtctgtaggctctgtagatactacgaattcaggacgaactttgtcttcgttgatgatgtactgccagcaaaggccatcacagtcttcttcctgaacagaaccaacaaccatgatcttgtaaccttccggaatcaggttgtaatctttcatgatcttagcgccgtaaacagcagatacaacaccgccgcactggtcagatacaccacggccaccgatttctgtttcgttctcataaccatcatatggatcgaatgtccagttgttgatgttgccgatacctactgtatcgatatgaccgtcgaaagcgatgatcttgtcacctgtacccatgtaaccgatgacgttgccctgtggatcgatgacaacttcgtcgaagtccagtttcttcatctcagcagcaattgtctctacatgcgccttttcatcacagctttcgccaggattcttaacgatggcacgtaagaaagctgtcatatcagcctgatagccctgtgctacttctttgattttgttaaagtctaacatttttttaccctccataatgttcatatattgtaacgttgcaaaatggtttctctatttatatgtaataactgtcaaaggcagttaaaacgaatgcttagttttcctgaagatcagcaaatggttctttgtctgtgccgcataagccttcccatacgatttcacgataacggtcaggatctgtatcgccttcagaagaaacaagaagtacctgagaattctcatccagtttcagtgcttccttgagttcctttaattcaggttttgtcatgatcgctgcaaccagacccattgtaacggaaccggattcaccggagataactctttcgtcacctttcattggtgagctgtaaatacgtgtaccgttggcacttacccaatcaggacaagatacgaatgcatctgcatgattgcgaagaatatcccatgatacagtgtttggttcgccgcaggcaagaccagccatgattgtgagcatatcgcctgtaacatctacgcggctgccgtcacccttggaagcagagcggaagaggcagtctgcagccttggcttcaacaactgtcatgatcggcggattctctttgaatctgttggcgaagtaaccaacaactgcaccggccagtgagccaacgcctgcctgaatgaagatatgtgttggacgacattcgtcagcttctaactgatgatcagcttcaagtgctaatgtgccgtaaccctgcatgatccatgtaggaatctcttcgtaaccttcccaggctgtatcctgaaccatgatgccgtgttctgtttcagcagcttcctttgcagccatacgaacacattcgtcatagttaagattctcaatagtaactgttgcattttcctttgcaatattatttaaacgagtctgtgttgtgcccttcggcattctgactacgcatttctgtccaagcttattcgctgcccatgcaacgccgcggccgtgattaccgtctgttgctgtgaagaatgttgcctgaccgaagtcttccttgagtttctcagaagttaatacatcataaggaacttcgctgacatccttgccgagctgctgtgccatgtatcgtgcgattgcataagaaccgccgagaaccttgaaagcattcagaccgaatcgataggattcatcctttacataaagtttcttaagtccgagatattcggccagatgcggaagtcctgtaagaggtgtaactgaatactgaggaaagctcttgtggaaattgtttgctttcgacatctcctccagagacatgttagcgacctgtttgtcatcgctcttcggcatcttgtttaatacccatttgatttgattatctgctttgttagccattgctgaacctccataaaaccatgcttgataagtctcattttgtctccctgtaatcatcataacagataatttgaaaattgcaagaggaaaatcaaaaaatttttaggaatcaaaaaaaatttttagaaagtgcttgtgttttgtctaatataatgttaaaatgacaatcagagaatatttcttttggtgaacttgaataaacgcgcatccatgagggagggaaatatttttgttattgtgtagcaaatgagtggaagtctccctatttgttaatcaaatgtcaaaacaacccgacatagtctggaagctgttcgggggttatgcatgatgtccttatcatatgcacacgataagaaggaaaatacataaaagtatagacttttagggaggtaggtgtcacaagatgaatagcaaagaagatcttggacggaagaaaggcagaaggctttcagctgatgacttatttaacatggagggtaagccctcatttttacaggcatttccattgtcattgcagcatgtagctgctatgatagtaggatgtgttacaccggcgatcattgtagccaatgcggcaggtctttccgattctgattcagttattttgatccaggcagcgttgtttgtttcagcattgaccacattgcttcagctttatccgctgttccatggcagtgcgtatgcaatcggttcgggtttaccaatgattatgggtatcagttttgcgtatgttccgacgatgcaggctatagcgactcagtatgatgtggcgaccatactgggggcacagatagtcggcggtattgttgctttattggttggtctgtttattaaacagatcaggaagtttttcccaccgttgatcacaggtacggttgtatttgccattggtctttcgttgtatccgacagccatcaactatatggccggtggtacatccaatgagcattacggtgcatggcagaactggctggtagcaattattgtattatgtatcgttacatacctgaaccattacggcaaaggtattttcaagcttgcttctatattaataggtattatcattggttacattatctccattttcttcggaatggtggatttctcatctgtaaccggtgcatcactgattagtattcctcagccgctgcattttggcattaagtttgatccgtctgcatgtgttgccatcggtttactgtttgcgattaatgcgatccaggcgatcggtgacttctcggctactacaacaggcggtctggacagaatgccgacggacgaagagttaaagggcggtattgtggcttatggtatcagcaatgttgtgggtgcggtttttggcggtctgccgacggcaacctacagtcagaatgtaggtattgtagcatctacgaaggttgtagcaagaaaggtattccgtattgcggcagtgattctgcttgttgcaggtctggtgccggtattctcagcagttttgacaaccatcccttattgtgtattgggcggtgcaacaatttctgtattcgcatccatcacaatgacaggtatcaagctgatcacaactcagccattggatttccgcaatacaacaattgtcggtctggcaattgcccttggtatgggtgtgacacaggcgaatgcagcattagcaacattcccagcttgggtaacaactatttttggtaaatcaccggttgtattggcgatggttacagctgttgtgctgaatctgcttcttccaaagccgaagggcagtgcagttgaacctgcggaagaaaaagccgagtaagatttatgtatattataaggtaaataaacattttatttaagtattaaagaaggaggcaggaatgatgctggttattggtaatggtaagttatttacaagaaatgatgagatgccctttgttgaaaatggtgctgttgcgattgaggggacaaagatcgctgctgtgggggaaacagaggctataaagaaacagtatggggatgcagaattcattgatgcaaagggcggcgtgatcatgccggcatttatcaatacgcatgagcacatttacagtgcgatggccagaggattaagtattaaggggtataatccgaagggatttctggatattctggatggtcagtggtggacgatcgaccgccatctgacactggaacagacgaaatacagtgcggttgaaacattgatttcctgtattcgcaatggtgtgacgacggtttttgaccaccatgcaagttttggacagattggcggcagcttatttacaatcgctgatgtggctaaggaattaggtgttcgtgcctgcctctgttatgagatttctgatcgtgatggcatggataaagccagagaatctgttatggagaatgcggaatttatccgttatgcactgaaagatgacacagatatgatcgccggtatgatgggtatgcatgcacagtttacaatttccgatgcaaccatggaactggcagctgcgaacaaaccggatgaagtcggctatcatatccatgtggcagaaggcattgaagatctgcatgactgtctgaagaaatatggcaaacgtatcgtggacagactgatggatttcaacattctcggtgagaagacgctgctgggtcattgtatttacattaaccctcatgaaatggatctgatcaaagataccaacacaatggtggtacataatccggaatccaacatgggcaatgcctgcggatgcccgccaaccatggagctggttcacagaggtatcctgacaggtcttggtacagacggttatacacatgatatgatcgaatcttataaggtggccaatgtactgcacaaacatcatctttgcgacgccaatgcggcatggggagaagttccgaagatgctgtttgagaacaatgcagccattgcaaatcgttactttaagacaccgcttggtgttctgaaagagggcgcagccggtgatgtcatcgttgtggattacaacccaccaacacagctggatgcatccaatatcaacggtcatattctgtttggcatgacaggcagagacgttgtgacaacggttgccaacggccgtgtattgatgaaagaccgtgagattaaagtaattgacgttgaagaagcaatggcaaaatgcagagaagaatctgcaaagctgtggcacagcatcaacggttaatcagattggggacaggtgcagcatctgttcaagcagatgctgtggatttaaagggaagatagaattaaaagaaatagagattgaaagagaatacaggaggttttctcatgagtgatagaatgacaggtatgtcttttgaccagttaatgaattgggtaacagaagaattagagaatcatggtacgctttttgggcttcatcgtgcttataaagcgcctgaagaagcgctgacaatttttggcagagaccttgagactccgattggtcctgcagccggccctaacagccagttagctcagaatattgcggcttcttattatgccggcagccgtttctttgaactgaaaaccgttcagatcatggatggtgatgaactggcagcatgtgtcaacaagccatgtatcaaagcggatgatgaagcttacaactgtgagtggtctaccgagctttatgttcctcaggcacaggatgaatacattaaggcatggtttctgctttcctttatggcaaaggaatacggccttggcagtatggatggtttccagttcaatatcagtgttggttatgatctggagggcatcaagtctgagaaagtcaacacattcattgaaagtatgaagaatgcagctgatacagaaaccttcaaagtctgtaagcagtatctgctggatcatgtaagcgagttcaaacatgtgacagcagaagatattgaagctatcagaccggatatctgtaattccgttacactttccacactgcatggctgtcctccgcaggaaatcgaacgtattgcaacctatcttttgacagaaaagaaactcaatacatttatcaaatgtaacccaacacttcttggctatgaatttgccagagaaacactggacaagatgggttatgattatattgcattcggccgtttccattttgaagatgatcttcagtatgtggatgccgttccgatgctgcagcgactgatcaaattatccggcgaaatgggtctggaatttggtgtgaagattacaaatacattccctgtagatgttaaggcaggtgaacttccaagcgaagaaatgtacatgtcaggtaaatccctgtatcctctgtccatttcactggcagcaaaactgtcacgtgaatttgacggcaaattgcgtatctcctattcaggcggtgcagatgctttcaatattgacagaatcgtcggatgcggtatctggcctgtaacagttgccacaacgattctgaagccgggcggctaccagagattacagcagatggcagattctcttgaggcaatgggcgtcggcgaattcaagggtatcgatgtggcggcactgaataaactggcagaagatgccattacagatgcgcatcatgtgaaaccggccaaattgcctgcatcaagaaaatctaatgaaacagttccgctgcttgactgctatacagcaccttgtcaggatggatgcccgattcatcaggaaatcccgacttatgttgcattagccggtgagggcaaatatgaagaagcactgaaagtgattctgaacagaaatgcactgccatttatgactggtaccatctgttcccatccttgtcagggttattgtacacgtaatttctatgagaaatccgtgcagatcagaaatacaaaactggaatgtgctgagcaggctatggatgctgttatagactgcgtatctgtaactggtgattacagcggcagtgttgctgtcgtgggcggtggtcctgcaggtatggcagcggcttactatttggcaagacttggcgcaaaggtaacaatttatgaaaaacgtgaacgcctgggtggtgttgtcagcgctatcattcctaacttccgaattgatgacagtgtcattgcaaaggatgctgctttacttgaaaaattaggcgtgaaagttttatataacacagaagcacctgccgtagatgttttgaagaaagaatatgacagcgtaattcttgctgttggtgcttacaaacgcggtgaactcaagcttgagggcggtgaagcacagaatgcactggcattccttgaagattacaatcgcacaaatggcaagatggccatcggcaagaatgtggttgtcatcggcggcggcaatacagcgatggatacagctcgtgcagcaaaacgctgtgatggtgttgagcatgtgtatcttgtttatagaagaacaaaacgctacatgcctgctgatgaacatgaattagtgttggctgtagaagatggtgtagagttcagagaactgttggcacctgagaaactggaaaatggtcagttgatctgccgtgtcatgaagcttggtgaactggatgcatccggtcgtgcaggcattgttgagacggatgaaacagtggctgtacctgcagaccgcgtgatcgcagctgttggtgaaaaagtgccgacagatttctatgaagcgaatggtcttcaggtagatgacagaggccgcgtgaaagtcagcccgactctggaatccagtgtagaaaatgtatatgtcatcggtgatggtctgtatggcccatctatcgttgtcaaagcaatggctcaggccatcacagcagcagaagctatctgcggccgtgaaatctcaggcagctgcgacatcgcagcagatccggcttccatctatgcgaagaagggtattctggctgaaccgggtgataaaccggaatccgaacgttgccttggctgttcaaccgtatgcgaaaactgtgtagatgtatgcccgaacagagccaacatctcaatcaaggtacctggtatggcaaaagcacaggtcatccacgtagactacatgtgcaacgaatgcggcaactgcaagagcttctgcccatacgcaagtgcaccataccttgacaaattcacgttatttgccaaagaagccgatatggctgacagcaagaacgatggatttgccgttatcgacaaagaagcagttacagcgaagattcgtttcttcggaaaagaaacaacctggacaaaaggacaggaaagcagcgtgccattcggcctgctgaaagtcatcgaggctgtttgtgcagagtatagttatttacttccataaaaccatataggcggagacttcaagtaccctgaatccactctgcctgtgacttacctctaaaaacacgctcattgcgaaatgttttcagaggtaagtcacaggcagagcggaatagagaaggaaaaagagtctccgccatttttatgtgtagaaataactataatctgcacggcaggcgcaggagggctggaaataaaggcaggggttttaatgtttggacattctggcaacaatatggtaaaaatgtcgtcttcgcaggtacttttgggttgagctaaatctccaataatgctaagatatactataaaagttagatacgacgttttataagaaagctaagggaccagagcagtcccggtgatagacaggaggttttagcgatgatccatcatatgatcatgacagccgatgaggcgattgagaagttaaagtcaggcaacatgcggtatttgctgatgaacagtaacagtggcaatgtgtcagcggccctgcgcaagtttacttatgagcacggtcaacatccccatgcgattattgtgacttgttcggattccagagtgattccggagacgattttttcggcgggtctgggtgagctttttgtgatccgtgtggcgggcaacgtcattgatgaccatcagctgggcagcattgaatatgcggccggacatctgggaagtcctgtggttgttgtgctggggcatactcattgcggtgcagttgatgcagccatcaacagtgatccggaagggtatattaagtttattacagatgagattaagctggcgatcggtgatgaaaccgatgattacaaagcttgctgtctgaatgtgaaacgcagtgtagctttgattgagcatagtctggatattcagcagattgaggagcaggaagggttgagagtcgttggcgccatgtatcacattgaagacggcagcgtagagtttttataagaaagaagagataaagtgagagaagaacaaaagggtgctgtaaaaaacagtatcggccgtatttttattactgcgctgctgatattgatacaggttgtctggcttattgaattgtttgtcaggctcaataagtattccactggaatttcattggtatccagtgcgattgcattgattgtggttattaaaatatatggccgggatatgaattccgccatgaagatgccctggatgattttgatcatggcatttccggtggctggtgtcggtatttacctgttatgcgggcattccggagtgaatatcggtatccgcaaacattttcaggcattgcagtcagaattgacgcctttattgccggataaagaagatattttgcagaaaatgtcggatgaggacaggcagacagctaatatggcgcattatatcagtcattcggcgggatatccggtgtatgacaacacggatctggaattttatcctgaagcggttgatggctttgaagctcagaaggaagcattgaagcaagcgaagaaatttatttttatggaataccatgccattgaggatgcgcagtcctttgcgggcatgaaaagtattctctttgagaaggcaaaggaaggtgtggaagtccgcctgatttatgatgatgttggcagtatgggctttatcaatacggattttgtcaaacagatggaaagccaaggtattcagtgtcgaattttcaataagattgtgcctttcgtcaatatgtttatgaataacagggatcacagaaagattacggtcattgatggacaggttggttttaccggcggctacaatctggcggatgaatatttcaatattacccatccttatggcctttggaaagataccggtgtgcggatggaaggagatgctgtacggagtcttacagttatgtttcttgaaatgtggaatgccattaagaagacggacacggattatacggcatattttccggagattacatatacagcaaagcagacaggctatgtacagccttatgcagataatccactggacgatgagcataccggagaaaatgtttatatgaatgttttgaacagtgcacgggaatatgcgtatttcattacaccgtatctgctgatcagtgatgaaatgaaaaaggcttttactctggcagccagaagaggcgtggatgtgcggattatcacaccgggcataccggacaagaagtttgtttatcaggcaacacgttcttattacaacagacttgtaaaaaagggtgtgcggatttttgagtatacgccgggattttgccatgccaaacagtgcgtatcggatgataaggcagcggttgtgggtaccatcaatctggattacagaagtttatatcatcactttgaaaatgcggcagctttttatcataaggacgcagttgcgggtgtgaaggcggacttcgaccatctttttgaagaatgccatgaagtgacagagcaatatcgaagccatcgttcaacagcattgagaattgggcagtgtattctgagattatttgcgccgcttctgtaaggtgcgtctaccatttttatagaatttatatatgtgaagaggtaaattaaggggcgataacaacgatcgaattagatagaaataatggaatctcagatgaagacgatgctttagagcgtttaatacatttatatggtcaggacattctggcctcaccaggtatgcagtcggagaaaaatttcaggcagcatggcagaatgtcggtgtatgaacattccctggcggtggccaggatgtgtctgagaattgcgaaatattttccgggagaagtggatatgcgttctctggtgagaggtgccctcctgcatgattatttcttatacgattggcatataccggatgaaagtcataaatggcatggcgttacccacgcgggagacgccttgaagaatgccaggcgggattttgaattgaatgagattgagcaggacatgatacgaaagcatatgtttccgctgaatccagtcccgccgaaatatcgggagagctggattctatgtatggcggataagatatgcgcctcaaaagagacagttaaaagacattagaattagcatatattcgtgtaaaaatcaacgaatatatgctataaaatattagtttttatccttaatattcccgctttttgcgttcataatcaacatttgcagtcggttttcgatgttggcaaagctgacatccggatcatagtccaatggcaggatctgtgcatccgggtacatttctttcaggcgtttgctgatgcctcggcctacaacatggtttggcaggcagccaaatggctgaaggatgacaaaggaacggcagccgtctttggcatggtgcaggatttctcccggaatcaggacgccttcgccggcatcaaatgtatgattgatgatcgggtcgctggctttgacaaggtcaggcattcggcaggccggtgtatagaggggatgctttttggcgatagcatctgccatattgtgagccatgtcgaaaacagtgtctactgtcgaaaaccagatttttttgtttaaaggtttctttaatttatattctttaatctgcgcatccagatagaaataggatttctggatgacgtctgtcatgtgggcttcaatgatttcgaagccgttatgttccagataattttcaatatcgtgattggcacccggatggaagttcaacaggtattcaccgacaatcaggacccgtggacgacggttggtgcggtcatattttacctggttcaacaggtcaatagcctttttaaagccttttttcagaccgctgataccgtgaagctcaaggccttccacaatggcatccatacctttttcaaaagcacggttagtgctgccggccaccttttcataaggtcggattttgcgcagcagttcttccagtacgtcaatcacaggcagagcaaaagccagacggatggcggaaccaaggctcattcggaagccgggatgcatattgtggtagtctacatcatcgttggtcagaatcggcacatcatggaatccggcgtcatcaagggctttgcgaagaagggcactgtaatgggtcagacgacagtcgccgatatatttgcccataccgatggccacttctttgccgtcgtatttgccgctctttaatgcagccagtgcttcaccgatcacaatctgacaagggaaacagatgtcgttgtggacatactgtttgccaaggcggatggcttcttcacggccgatttccagtggttctgcctgaatatgctgtcctcgcatggcggctgacataattcgacagaaagcatgggaggtattcggaacaaggacaatctttttgcggcagtcttctttggtgaatttcaccgggtaagggtcttccaacgggtgaatatccagttccggatgaatggcatggttcatgctgaccgtttctgtaaaagaacggacacggatacgcagcggaccctggatatcactttcgtccagtttcagaaccagcggtgtcttgccggaaatttccttcatcaggcgaatgatttcatcggaaaggtaagcgtcatgtccgcagccgaagctgacaatctgcacatattccagatgtggatttctggcagccagaatagcagtggacagcatgcgggcatgataattattgacaatatccagtcggctcatgctcaaatccacatggtcggcttcttccagagaatctgccgtcagcaccggaatgccgagacttgtaaacatttccggaaggtcatggttcacaagggcatcgttctgatacggccttgaggccagaacaacggcatagctgccattggcagtgacttcatcaagaacagcttttcctgcccgatgcatttcatcatgaaactgtttttcagcggcatcggcgacgttaatggcctgtcgggtttctgccggggaaatgccgaaagccttctccatatagccggtgagctgacggtttctgtcctcgcgcttgtaccagtggaaaagtggtgcgtcaaatggtatatgccaacgcttttcagggttatcggagttacggatgacaatcggatagcctttgacgatggcacacatagattcgctggtgctctctgtattttcagatgttactgttgtgatggatggcatgaaaatacgatccacacctttttttaccagattgcgcagatgaccgtgtaccagtttagctgggaagcagacggtatcggaagtgactgcggacagtccgtcttcgtaaattttgcgtgtgctcagatcggacaattgaatcttaaatcccagagcacgccagaaggtggtccagaatggcatggtttcccaataggaaagcacccggggcagaccgatggtgatgtcacgttctttagcagctttcggataagggtagtctttaaacaacagttcctgtcgaagtttgaagagatttggtgtctgttcacgggatttctttgcatctgcaagctgctgtcggacagaagcatccttcggatcaccgaggatttcgccgcgttcgcaccggttgttggttacccaggaattgccgttggaaaaacggacaatggttcgtttacaatggttggcacagaacgggcaaggggcgttggcttcttgtgtataggaaaaatcagccataccgtcaatgccgataaatgttttggctgggtgattctgttcaaagcgtttcttagtaataagagcagcgccgatggcacccataatgccgggataaggggcacggatgacttcacgaccggtgtactgctcaagggcacgaagtacggcatcatttctgaatgtaccgccctggacaacaatcttgtcgcccagactgtccaaattggagattcggataacctttgtaaaaacattttcaatgatggaacggcacaggccggccataatatctgcagattgtttgccgtttcgctgctccgtgacaatgctgctgttcatgaaaaccgtacagcggctgccaagagaagccggatgtttggatgaaaaagcggcttcggcaatttcttccacaggaatatgtaaagatgaagcaaagttttcaaggaaggaaccgcagcctgaggagcaggcttcgttgacaacaatattggtgataatgccgttgtcgatccagatggctttcatatcctgaccgccgatatcaaggataaatgtggcatctttgatatacttgtcggcagcccgggcgtgggcaacggtttccacaacatggcattctgtgttgaaagcttttgaaaacagcagttcgccgtagcctgttgtacctgcggcaatgatatccagtttggcaccagtcttttcgtagcggtcatggatggtcaacaaggctgtcttggcaacagtcagtggatcaccctcatttggtgcataaaaagaatcgagaatattttcatcctcatccatcagcacaaatttcgtggtagtactgccggaatcaatgccaagataagcatggaccgtttcgcccttttgcggtacataaggtgcaaattccgggagttgatggcgttcattaaatgcacgatgttcttcttcggattcgaaaaacagcggaccatctgcagaagcttgcaaatgggcacgaagttccggattctccaacagatcaagataatgttttggcatataccatgaagaattgcctgcaaacataccgtccagagaaagagctgcgccataggcaatcataatctcaggatgggttggacgcagtgtttcctctggtgtgaggcccagacgttttgcaaaaacatttaccagtgttgggttaaaggtcagcggaccaccctcaaaaacaacaggtttctggatatccagaccctgagccagaccgccgatggtctgtttggcgatagcgtggaaagaagacagtgccagatcctggcgggaaataccctgattcagcaggggctggatatctgtcttggcataaacaccacagcggccggaaatatcataaatgcagctgccctgagaggccagttcattgaattcttctacaggtacctttagtatagaagcaatttcatcaataaaagcgcctgtgccaccggcacaactgccgttcatacgcatatccgccacattcagtgtctgtgtggccgggtcacggcggaagaaaatcatctttgcatcctgaccgcccagttcgatggcggttcccacattgtcatattccttctggagggcgatggaattggcaacaacctcctgaatatagcagcaaccaagggcttcagccagatgcttggcaccggagcctgtcagggccagacggatacgggcatttggaaatttatcctcaaaaaatgccagggcatcctgtacactctgggcctgggctgcgttgtggcgtttataatcagataataaaatttcatgcttttcgggattgatggcaacgattttggtggttgtggaacctacatcaataccaacgaaaagctgtgtatcatttgtagtaagattagacatgataagactcctatatcttttaactttcgggattcatttgagaatcctggtgtggaatcagattctgctggacgcgggtcaaaagcgtgagcaggatttttttctcattttcagagaggccttctgacatatggtcgaagacatgcgtcatatgggcttctgcattgcagcaaatattctttcctgccgcagttaatgcaacaattttgatgcgcttgtcatcaatgctttgggtgcaggtgacaaaatctttcttctgcagccgtttaacaagaccgacggtggtggactgtccaatctgcagctgtttttcaagtgctttaagtgtaagtgtgtgcgtaccatcaggggcatgattcagcgcctggagcagataaatctgagaaaccgttaggtccatttcacggagcttgttgttggcttctttttccatagcacagtgaatatgtcgaatcagggggacacattgttctgtataagtcatgcgattttcctttttatttggagggtgcgaaacttcaggtgctttgaaaaatctgctaatcagctgttcacagcaagcacgttcacactgcctgtctccgctctactacggtcggtgctaacacaggtccactggacctgtagcaccattggcaacggtacataaggtgctaaaggacagcacctaagtaccggccatgttagaagcacctgctgtgaacggctgattagcagattttatccaaggaagttgagtttcgcaactggctaaagacctaaaatatgtatttgtaggttgaataggttaatatttcattataaagatttaaatataatgtaagcatgttagagtatagcatttccggatgaaaaattcaatagcatggcattgaatgaagggcgaaaaactgttaagaaatggttaagaaatgctttagatggagagaatatctgatataatggggtgataatatgtcttatgaaaggttgtatgtgcggttgatttccggcaggcgcttatgatgcagttggtacatggcggtgttggatgacgttttattgataagttgatggaggattttgaatggagtatagacaaaatgactggtcgattcttgggtttgggtgcatgcggttcccgaaaaagggtggcagtgtggatatgaaggaaacagagcgggagctggcctatgccattgcgcatggcgtgaattattttgatacggcttacatttatcgcggcaatgaaaaggtgttgggggagttggtggcaaagaatcactggcgggcgcagattcagattgccacaaagatgccgcactatctcattcactctatagatgagttggagaagcttttttgtgaacaactaaagcgtttgcagacggattatgtggataactatctgatgcatatgctgccggatgtgcatatctggaagaaattagtccggatgggaattcttgactggatcaatgagaaaaaggaaaacgggcagattcgtcggattggattttcctaccacggcaacagtcagaattttatagcgcttttggatgcctatgattgggaattttgtcaagtccagtataattatatggatattcacaaccaggccggtgcggaaggtgttgcttatgcagcgaaaaagggcattccggtgattatcatggaaccgctgaggggcggcaggctggtcaacggtttgccgaaaaaggctaaggatttgtttgcggcagctgaaccgaagcgcagtccggcagaatgggggcttcgctggctctggaatcagccggagattagtgttgtgctgtccggcatgaatagcatggcaatgattcaggaaaatatacggattgcagatacagtgaaagtcggagaaatgacagaaaccgatggtgcgatgtttgaagatgtcagaaatgctgtgaatgagaagatgaaagtaccttgtaccggttgcggttattgtcagccctgcccatatggcgttgatatcccaggggcatttagatgctataatgtgcgttataccgataacttttttacagggatgcgggagtatctgatgtgtacgactttcagggcagaacggaccaatgcgtctttgtgcagacaatgcggcaaatgcgaacagcattgtccgcaggggattgctgtccgcaaagaattaaaacaggtggttcgtcatatggagaacccggtttataaagttattgcattttttgccaaagacatgtttaaaaaataaagttattctgcgatttcatgcattgcctgaatagccgtatcaatttcagcttcggtgttaaaacatgaaaagctgaaacgcacggccccctgtttctctgtgccaaatgttttgtgcatcaggggtgcacagtgggcaccggcgcggacacagatttcgtagtcttcccagagaatatcgctgacggaggcagaactcatattgccgatgttcagtgagataatcggtgtacgaagaggtgcatctatatcaccgtatagtttcaaatcagaaatctcggaaataccatttacaaagcggcgggccagagaaatctctttggcatgaatgtttttgacaccagtcgatagaatataatccaatccggcattcagtccggcgataccgtgcccgtttaatgtgccggcttctaatgctgtgggcatatctgtcggatgctgtctgtcgaaactgtggataccgctgccgccggacttcaaaggcgaaagagttaagccttcacggacatagagaccgccggttccctgaggaccgaagagccctttgtgtccggtaaaacagagaatgtcaatgcccatttttaccacattgataggcagacttccggctgtttgcgaagcatccacaatcagcagcagtccatgtttttttgcaaaattcgacacaaaagccaaatctgtgacgtttccggataaattggaagcgtgagtcaggacgatggcggatgtgttggattttacggaagattccagtaaatcataccggatacggccttttttgtcagccgggataatggttagttcagtgccttctttttctttcagatagagtggacgaaggacagaattgtgttcgcatgcggttgtgataacatgttcaccgggatggatagcgccatgaatggcaatgttcagggcttccgtggcattgcatgtaaaagcaatgcgggatgggtccggtgtgccaaagagtgcagccagtttttcgcgggtatcataaataagtcgggaggcgttcagggtcggggcatgagcgcctcgaccggcattgccgatggtattaaaagagcgaaagacggcttccgccacttgaggcggctttagaaatgaagtggccgatgaatccagataaatcacactaaatccctccttttggcagctgtcagtgcggcacccagagcaccggcatatctggcaaatgcgtcggtttcaaccttgtgttcgagtttgtcggaaagtgtctgaataaaataaggactttcacagagaccgccggtgagaacaatattttcttcaacaccgaagcgtgctgccagattggcaacccggttggcaacggagtgaatgacaccggccgcgatatcttcacgtttctcaccggagccgatgtggctgataacttctgattctgcaaaaaccgtacacatggcgctgatagccagaggctgtcctttggctgccagttcatacatttcattcaaatcagctcccagacgggtagccatgacttcgatgaatttgccggtaccggcggcacatttgtcgttcattagaaaatctgccacctgtccgtcaacaactttgatcattttggtatcttgtccgccaacatcgataatggtcatatttttcttaaaaatggcccatccacctttgccgtggcaggtgatttccgtaacaattttgtcagcataatctacacagatacggccgtagccggtggcaacgcagcgcatgtcatctgcatagccccggcttttgagctgttccagaatggcattggcggtttcgcggccattccatcctgtgggcagtacaaaataatcttcaattttaccctctttcaaaacaaccgttttagaagcggtcgaaccgatatcaataccggtaaaataaacaggtgttgtattcattgatttattatttctccaatgtttcaagaaaagcttccagacgggtacgaatctggcctttatccgcctgggaataatcagtttcaatcatcaggtaggattttcctttatttgttacagtctgtttcacatagtgggattcgatattgtaagtatgacaggcctgaaggataatttcgatgacgccgtctacctgatattcgtcaatcatttcgtcaatatactgcatacggctgttgttcgggctcataacagagcagttgatattgaggtattttttcgcaagggcgtcataaatcggcatattttcgtcaaccggttctactttttcacgggtaccgttgcagcagtcgaaagctaccacatctgcgccgagttcctcaacagttttgataattttgtcacggacaccgctgtttggacatcctgtaatcaggagtctcggacgatcacttgctttacctttataattagcttcccagtctgtcaacacttcttttgtgcgttcctcgataatagcaatacgttcttcgagattaaaattaaaaccaagaccgtccaggcgggtacccatctcataaccgctgattggtgcaggattcagtttgcccagttcaaggaaaccaagcatggcgcggcgttcgtgatttttcagacggatggcatcacgaatgtcttcttccgtaatggtgatatggtaaaaatcttccagtttttcttttagacggatgatttcctcggtccaggaacggagcgctgcgtcgtctctggagtgcggcagctgcataacgtaagtttcttttaactcgttcatcagttcaaacatcttgcgcttgccgtcacaggtggtttcacccacaatgaaatctgaaaaatagaaataaggacatgtgtctgtcagtgcgaaaccgtagctggctttgatcagcggacagagattgcgaggcagtttcgtctcggcagcaggaatcggttcatcgctggaagcgcataaaggcgcagcggcagcaccggcagccatcagaagttcctgaggaacaaaagagcagtaaacccccacgatacggccgccattgtctttgatttctttcatcttcataaagccggatttgcgagcttcagcgtaggtttcaaaattagctggtaaattcaacattgtaaaatcctcctttggtgaattgttttcataattgcctgataagtatcatgaaaagttactgtttatagcaatgttctaagtattttataaactcacaaacgtagtcttttaaaataaaatccttatgatagatgatataaaattctctaccggcgatatgtcccggcagttcgaactgcagtagtcttttggcatcgatatagtcatggacggctttttcggagacgatggagacgccgaggccgccggcaacaaggtttttgatggcttcctgatcattgatgcgggcagcaatatggagtttatcttcgggaatgccgattttttcgagaaaagcagaagccgatttgccggtgccgctgccctgttcacgtaagatgacaggctgctcctgaaggacattctcaagggaaaagttgccagtatccttcatttccagaaaatagtcagtgacaggtgcaatcagaaccagatgatcctgataaaactttttgaaaacaagctgttcgtcatcggttttcatgcccacaaggcccagatcataactgcctttatgaacagcatcaataatgccgcggctgtcgctctgggtaacaacaaaataaatatcatcgtggcttttgccgaatgtcggcagtacttccggaagaatataggcggatggaattgtagaaacgccaagacgaatcaccttggaaccgtgaccgttccagcggctgaccatgtcatctctgagtttcagaatgttttgggcacattcaaaaagttccatgcctcgaggggtgacttcaaagcttttggctgtgcgtacgatgagccgtgaatttaattcttcctccaaaattcggatatgagtgctgatggtgggttgtgagatgcccagttcttcggctgcttccgtgaaacttctgcagcggacaacggagataaaagagtgcaattgtttaaaatccataggggcctcctgtaatcgtatataagtcgttagtaacagtatacaatttattattataaaaggcaatgaatatatttgaaatattgataaaacacgtcgaaaatgttgtcgaaatgggtgaaggactgccatttaaacggtttataatgtagggtaataaataatacttttacaattaattacaattctggaaaaaaagcttgtgaataggtacgacctatgtctataatagtaattaaaataaggaggattttatcatgccacagagaacagacattcataaagtacttattattggttctggtccgattattatcggtcaggcctgcgaattcgattattcaggcactcaggcctgcaaggcattgaaaaaactgggttatgagattgttttggtcaattccaaccctgcaactattatgacagatcctgagacagcggatgtgacgtatattgaaccgttgaatgtggaacgtctggaagagatcattgcaaaggaacgtccggatgcgcttttgccgaatttgggcggacagtccggtctgaatttgtgtgcagagctgaataaggccggtattttggataaatatcatgtaaaagttattggtgtacaggtggatgccattgagcgtggtgaagaccgtattgaatttaagcatgcgatggacaaacttggtatcgagatggcgagaagtgaggtcgcttacagtgtggaagaggcccttgctattgcagataaactggattatccggtggtccttcgtccggcttatacaatgggtggcgccggcggcggccttgtttataataaagaagaattaaagactgtttgtgccagaggtcttcaggccagtcttgtgggccaggttcttgtagaagagtccattcttggatgggaagaactggaactggaagttgtccgcgataaagataacaacatgattacggtatgttttattgagaatatcgaccctctgggtgtgcataccggcgattctttctgtgcagcaccaatgctgacaatctctgaagaatgccagaaacgtcttcaggaacaggcttataagattgttgaatctgttgaggttattggtggtacaaacgtacagtttgctcatgatcctgtgacagacagaattattgttatcgagattaatccacgtacatcacgttcatctgctctggcttctaaggccacaggtttcccaatcgctcttgtgtctgcaatgctggcaacaggcttgacactgaaggatattccttgcggaaaatatggtaccttggacaaatatgtaccggatggagactatgtggttatcaagtttgcacgctgggcttttgagaaattcaaaggcgttgaagataagcttggcacacagatgcgtgcggtcggtgaagttatgagtattggaaagaactacaaagaggcctttcagaaagccatccgaagtcttgaaacaggccgttacggtcttggtcatgcaaagaattatgataccatgacaaaggaagaacttttacatttgctgattaatccgacaagtgaccgtcattttattatgtacgaagctatccgcaagggtgcaacaacagaagagattttcaatctgaccaaggtgaagacatactttattgagcagatgcgtgaattggttgaggaagaggaagaaatccttaagtccaaaggtcatctgccggcagatgcacttttgatccaggcaaagaaagatggcttctctgataaatatctgagccagctgctggagattccagaggaagaaatccgcaatcacagaattagccttgggattgaagaagcatgggaaggtgttcatgtcagtggtacaaaagacagcgcgtattattattccacttacaatgccaaagacaagaatcctgtgtctgaggcaaaaccgaagattatgattctcggtggcggtccaaacagaattggtcagggtatcgagtttgactattgctgtgtacatgcagctcttgccttaaagaagcttggttttgagaccattattgtcaattgtaatccggaaactgtttctactgattatgacacatctgacaagctttattttgagccgttgacactggaagatgttctcagcatttataagaaagaaaaaccattgggcgtgattgcccagtttggtggtcagacaccactgaatctggcagcagagcttgagaaaaatggcgtaaagattcttggtacagcacctgcagtcatcgatcttgcagaagatcgtgatctgttccgtgccatgatggaaaaacttgacattccgatgcctgaatccggcatggcaacaaccgttgatgaagcactggagattgcaaataagattggttacccggttatggtacgtccttcctatgttcttggcggccgcggtatggaagttgtctatgatgatgagagcatggtcggctatatggcagctgcagttggtgtgacaccggacagaccaatcctgatcgaccgtttcctgaatcatgctacagaatgtgaggcagatgccatcagcgatggtacacatgcctttgtaccggctgttatggagcatattgaactggccggtgttcattccggtgactctgcttgtatcttgccttctgtgcatatttcacctgaaaatgtggcaaccatcaaggaatatacaagaaagattgctgaggaaatgcatgtcaggggcctgatgaacatgcagtacgccattgagaacggcaaagtgtatgttctggaagccaatccgagagcatcccgtacagtgccgcttgtatccaaagtctgcaatatccgtatggtgccgttggcaacagatattattacatcagaattaacaggtcgtccgtcacctgttccggaattgaaagagcagaagattccatattatggtgtcaaggaagctgtcttcccattcaatatgttcccggaagtagatcctgttctcggaccggaaatgcgatcaaccggtgaggtacttggattatccgagtcctacggcgaagcctttttcaaggcgcaggaagccgcatctctgaaactgccgttggaaggcacagttttgatctctgtgaataagaaagataagccagaagtcgtggatgtggcaaagcgcttccatgaagacggctttaagattattgcaacaggaaagacctgtgatctgttgaatgaatctggtattccagctgaaaaggtgaagaaactttatgaaggacgtccgaacattctggatatgatcacgaatggcaagattgaccttgtagttaattcaccggcaggaaaagaaagtgtgcatgatgacagttatcttcgtaaagccgccattaaggcaaagattccatatatgacaaccatcgcagcagcgaaagcaaccgctgagggcattggttatgtgaaagcacatatggaagaaaataatagagttaaatcactgcagcagatgcacagtgaaattcaataaaaatattggcaaaacatttaagttttaagaactgcccggctatgtgtttaaaaagacatttggccgggcagttctctcgtgagactgttacattctctcaataaattcttctaaaatcattttgggtctttatttagaagatgcagtatttgtatagatgaagattatataatgcaataataattttgaaaaaacagagtcttctattgacatcatctctatctgtggtatacttaaattaacatatgaataaatgagcatataaatgattaaaaataaataatatattcaaaggagattttattatgaagaagacgtataagattgatgtggattgtgccaactgtgcgaacaagatggaagatgcagcgaataagacagccggtgtgaagaatgcggttgtcaacttcatggcactgaagatgagtgttgaatttgaagagggtgcagcgccgaaggatgtcatgcaggaagtattgaagaactgcaagaaggttgaggacgattgtgagattttcctttaagacagaatgaatacggaagttgtgagataccaggattggatgcgtctgaccctggtatcctgccatagagtttgaagtttgttatagatagtatgactgaataaaggaaggtgagctgtgtgaataagaagcagaaaaaggttttgacaagaattattatagcagctgttttgatgattgctttttcttttcttccggttgaagactatacggcgtttgttttatttctgattccgtatcttgtcattggatatgatattctgatcaaggccggcaagggcattaagaatcatcaggtgtttgacgagaattttctgatggcggtagcaaccgtaggcgcgattgcccttggtgattatcgtgaaggtgttgctgttatgctgttttaccagattggcgagctgttccagagctatgctgtgggcaagagtagaaggaatatcagtgatctgatggatattcgtccggattatgcgaatatcgagcgtgacggtgaaattgaggaagtggacccggatgaagttgagattggcagtatcatcgttgtcaagccgggtgagaaagtgcctattgatggcgtgatcattgagggaaccaccacattgaatacaagtgcactgacaggagagagcgtgccgagagatgcatcggaaggtgatgaagtgatcagcggctgtattaatatgacgggtgttctcagaattaagacaacgaaggaatttggtgagtcgacggtttcgaagattctggatatggtggagaacgcaagctcaagaaagtcccgttcagagaactttatttccaagtttgccaaatattacacaccggctgtatgctatggtgcgttggcgctggcagtgcttccgccgattgtcaggatgctttttatgggtttttcaccggaatggggagattggatcatgcgagcgttgacattccttgtcatcagctgcccgtgtgcccttgttatcagtattccgcttagctttttcgccggtatcggcggtgccagcaatgcaggtgtccttgtaaagggttctaattatctggagacactggccggaacgaaatatgttgtatttgacaagacaggtacaatgacacagggggtatttgaagtaacaggtgtgcatcacaatacattgccgatgaatgaaatccttgagtatgccgcattggcagagagcttttcatcccatccgatcagtcgcagccttcagaaggcttacggcaaggccattgatcagagcagagtgacggatgtgcaggaagtcagcggtaaaggtgtcatcgcgaaggtagacggcagaaccgttgctgcaggcaatgccaagttgatggaactggaaggtattccttatcaggagtgtcacagcgtcggtacagttgttcatatggcagtagatggtgaatatgtcggtcatattctgattgctgatctgctgaaaccgcatgcagaagaggctatcagagcactgaaagtggccggtatcaagaagaccgttatgctgacaggagatgccaaacgtgttgcggacaaagtggcggcgaatctggggattgatgaagtacacagtgaattactcccgggtgataaggttgctatggtggaaaaactgctgtcacagaagaatgagaaagagaaactggcctttgtgggtgacggtattaatgatgcaccggtactttcaagagcagatatcggtattgcgatgggtgctatgggatctgatgcagccattgaagcagcggatattgttttgatggatgatgatccgctgaagattgccaaggctatcaggattgcccggaagtgtatgagaattgtttatgagaatatttattttgccatcggtgttaaagtcatttgtctgattctcggtgccttgggtattgccaacatgtgggttgcgatttttgcggatgtaggtgtgatggttattgccgtgctgaatgcgattcgtacattgtatgtgaagaatttgtaagcaattacttttgcctatatagtgggtatgtatgtcgttttacgtaaataggtagttaaaaaagtgttcattgacattgatgggacatgctgatataatgatttcatattaatcatacgaatatgatatgaaaagtttgcggagcagactggcattttataaaatcataatcggaggtatggacgagaatggatcagctacatgaaaaatatgaaaatttaaaggcgtatctgaaatctctgggcagtgtggccgtggctttttcaagcggcgtggattctacatttttattaaaggtagcacatgatgtgctgggggacaaggccattgcggtgacggcagcatcctgttctttcccggaaagagagttgaatgaagcaaagaaattctgtgcagaaaatggcattcagcatattgtttgtgaatcagaagagctggatatcgatggtttcagacagaatccgaagaatcgatgctatctttgcaaacatgagttgtttgagaaggtttggaatattgccaaagagaatgggctgaatgcggtggcagaaggttccaatatggatgataatggagattacagaccgggtcttgtggctgtcaaagagctgggggtcagcagtccccttcgtgcagcagaactgaacaaacaggagattcgtgagttatcaaaggaattgggactttccacatggaataagcagtcctttgcctgcctgtcttcgcgttttgtttatggagaaaccattaatgaagaaaagcttggtatggtggagaaagctgaacagctcctgcttgatctgggattctatcaagtgcgtgtaagaatccatgacaaaatggcaagaatcgaaattctgccgtcagagtttgaaaaactgttggctgaggggatccgtgaaaaagtttacaactatttcaaagaacttggttttacatatgtaacactggatctgggcggttaccgcacaggcagtatgaacgaaacacttcattagacgaaaaacggggctgcattgcagctccgtttttcagtcaaggtagacagatagaatttgcgatccggatgaacattaataatggactttaagaacagcgtctccgatgtgaaccggtcctgttttaagaagttcgacggattcagcgccgccggcaccggtgatgacaacaggggtgacggttctgcaaccggctgattgaataccttccaggtcagctcgcaggatcagatcccctttttggattttctggccttcttggacgaatacttccagatgctggccgtttaatttgacggtatccaaaccgacatgaaggatcagttctgtatcatttgcagtgtgcagtgcgatggcgtgatgtgtatcaaaaaccatggcaacgctacagtcaaatggtgcatagaaactgccgtcaacaggttcgatggctaatccttcgccgatataaccttcagagaaaacaccgtcattgatttctttgagcggaatgacagtgccgttgcatggagcatagacaatatcagtgatggcgtcggcaactgataaattgtcagaatcttttgcctctgcggaaacagcaggatttgagacttctgctgaagttgttggaactgcggcggaattatccgctgtcgatgatgaagcaggaatgatctgagagatataatcctgcagacgggcatggataaccgtgacttccgggccgtaaacaacctggacgccgtcaccattggccacaacagcagcagcgcctgtggcgagaagcttttctttgttgagctttgagggccgatgtaaagtgacacgcaggcgcgtcgcacagcagcttaaatcggaaatattctcaagaccgcccagaccgtcaagaatctgttgacttttgttatcagcgttattgacaggggcggcattgtccttttcatgtcccggtgtctgatagttaaatttcaaaatcattacccggaaaacgataaaatagacaatgaaataaaggatacctacaggaatgacatgcagccagctggttttggtattgccctggagaatgccgaacaggaagaaatccaggaaaccgccggaaaatgtcatgccgataccaacattcagcatatgcatgagcatataggagaggccggcaaatgcacagtgaatgacatatagcggcggagcgacgaataaaaaggcaaattccagaggctctgtaattccagtgacagcggaggagatggctgcggacagcaaaaggcttcctacagcttttttattttcagggcgggcacaggtatacatagccagggcagcgccgggaagaccgaacatcatcaacggaaatttaccgctcataaaacgtgtggctgcgacactgaaatgtgaagtatcagggctggcaagttctgcaaaaaagatattctgggcaccttcaatgagctggccgtttacaagttcacgaccgccgacagcggtttgccagaaaggcatatagaaaacatggtggagcccaaaaggaatcagggcgcgttccagaagcccgtagacaaaagtgccgccgtatccggacatcagcaccagtttgcctgcatcgttgatcagaatctggatcggcggccagatatagaacataagaataccgatgccgacataagtgattgcgctgatgatcgggataaaatgtgttccgccaaaaaacgaaaaaaccttgggcagttcaattttgtaaaaacggttatgcaatgcagcaacgccaagcccgacaatgatgccgccgaaaacacccatctgcagggacgtaatgccgacaatttcggtggttgcaccggtgagaaaagaatggcttcgacccgtataagttatcagacttccgatggtactgtgcataacaaagaaagcaataatacttgaaagtgcggctgtggctttttcgctcctggccataccgatagcaacgccgacagcaaaaagaatcggcagattgtcaaaaatgatcgaaccggcactgttaagcagtgaaaacaggatgtaaggagctgttccgggccccatgagccctttcaggtgataggcggccagcatgtttgtattggtcagagaactgccgatgccgagaaaaataccggcgataggcagaagagcgatgggcagcataaaagactgaccgatacgctgcaaaagactgaagaggtgttttttcataaaaaatcctttcgggacggtgggagtggaaattctgtcttcagcttaatccagggtaatagacagaatttcctacccacctgcctttgaatgtcatatgttatatttcataaatttatttaccttatttatgataacacacatttgtataatagggataaaaagttgttggcagcttgtgtgtatttctggtgttttatgtgatattcgggtataatagatgttatagaataatcggcttcaagcggggaagggtggagtcgggatgtgaattgatgatgtatgatgagaaacgaactgggggcgcaggtatggtagagaaggaagagttttatttgaattcaacgaatggggtgaataagcttcatgtgatcttgtggcatccgttggaggagatcagggcgattgttcagatttcccatggcatgtgtgaatatgtggatcgttatgacaggttggcgacattcctggcacagcatggtatgatggtgatcggcaatgatcatctgggccatggggagacggcgaagggtgaagaggaactgggatattttccgaaggcgaagggctctgagacagtcgtggatgacttatataaggtaacgaagtcgatccgtgcaagatatccgagaataccgtatttccttctggggcatagtatgggatcttttatggccagaagatatctgatgacttatggcagccagctggatggtgcgatactgatggggacgggttcacagccgccggcactgctgagtgcggcgaagaccacagccaacagcctgagtgttgtcagaggtgaacatcaccgaagtcagctgatgatgaaaatggcatttggctcatataataaacagtatccgtctgtcagaacagagtatgactggctgtcccggaatgatgcgaatgttgacacttatcttgaggatccttattgcggttttatgtttacattgaacggttataaagttttatttgatgtgttgagctttattcaggagccggcccatatcagcaaactgccgaaagaagtgccgcttttatttgtggcgggaagtgatgatcctgtgggacatttcggtaaggacgtgccggaaatctgcagaatttaccgtgaggcaggggttaagaatgtcgaaatgaagatttatcccggagacagacatgaaatactcaatgaacttgattatgaacaggtacagatggacatactttcctttatagaaaagcgtcttgaggcgctggaggcatgacaggaggagtagacatgacatttgaacgtatagacatggaacagtggccgcgtcgggaacactatcgatattataatgaacagatccgcaccagttatgagatgaatgtggagctggatgtgacgaagttgaggaaacgttgcctgaaaaaggggattcatttttatccggcgatgatgtatgccattatgtacagcattaaccatcatgagaatttcagaatggccctggatgaagaaggccatctgggcgtatatgatatctgtcatccgtcctacacgatttttcacaaagatgatgaaacattttcagatatctggacagaatggaatgaggatttcagcatattttacaaagatgtctgcagagatatgaagcagtataaggatagcaaaggaattaaagccaagccagatcgtccggatgcctttacgccggtatcctgtgtaccttgggtttcttttacatctgtgggacatgacacaccgggaccgaggcagatgtattttccgattattgttttcggacgttaccatgaggttcatgatcgctggatgctgcctttcagtataatggtcaatcatgccgtggcggatggttatcatacttctatgctgatccatgatatacaggagcagtgcagtcattgcaagaagtggctgaagaaataatagagaagaactggcagatgggagttgtccatcatctgtcaggtgctgtgcagaaatgcgggcaagattatgggtttacacagaatttacgtagataaagctcaaaaagtccaaaatacacctgaatgtaaatgaaattttacattaattttacatgaaatgcctttagcctttacatagtcatcgtataatcgggaatgaatagggaaactatttatgaacagatgaatgttatgaagacatgtaaaggagaaatttatgagtgtatttgatattttaacgatgattggcggccttgccctctttctgtatggtatggaagttatgggcaacggtctgtcaaaggcgtccggcggacgtatggaacgtattctggagaagatgacagacaacattttcaaggctgtactgttaggcgccggtgtaacagctgtcatccagtcatcgtcagccacaacggttatggttgttggctttgttaattccggtattatgaagctgtctcaggcagttggtgttattatgggtgccaatatcggtacaaccgtgacatcatggcttttgagtctgacaggtattcagggggacaattttattctgacattgatgaagccgtcctctttttcaccgattctggccgtaatcggcatcggatttctgatgttttccaagaatgagaagaaaaaggatataggtaccattatgattggttttaccgtgctgatgtttggtatggaaaccatgagtgatgcggtgaaaccactggcggatgtgcctgaatttgcgaatattctgctgatgttcaagaacccgctgctgggtatgctggcaggacttgtcctgacggcagtgatccagagctcatcggcatcggtcggtattctgcagtctttatgtgtgacaggggccgtcagctatggtgcagctattcctattattatgggacagaacatcggtacatgtgtgacggcactgctgtccagtatcggtgcatccaggaatgcaaagcgtacagcatttgtccatttgtatttcaatattatcggtacgacgatttttatgattggtttttatgcgctgaatgcatttgtccatttcagttttatcgacaatatggccaatccggcaggtattgcggtcatccacagtgtgtttaatattttcgcaacagctattttacttcctttccacaggggacttgagaaactggcgatccttactgtcagaacatctgatgaagatgagaagcagtctgtacagcctgcagaggaaggacaggatatgctgcttctgctggatgatcgtttcattgagaaaccgggttttgccatggagaattgttattccgttacatctcatatggccgagctttccagacaggcattgtttattgccatggagcttctgcagaaatatgatgagacaaaggcagagaatgttctgaaactggagaataaagtggatcattatgaggaccgtctgggtacgtatctgattcgactcagcagtcgtgatctgtcggaaaaagacagcaagagtctgtctatgctgctgcactgcatcggggatttagagcgaatttccgatcatgcggtgaacattatggaaaaggcccaggaaatgaacgagaaaaacctgtcattttcggataagggtgcgcaggaactggaagtttattccagagcagtgagagatattatgaatatgtctattgaggcatttaagaatgatgatattcatctggcacgtcaggtggaaccgcttgaggaagtgatcgactacctgaatgatgagttgaagcagcgtcatgtcagacgacttcgcagcggcgaatgttctgtggaacttggttttgttttatcagatatcacgattaattatgagcgagtggcagaccattgttccaatctggccgttgaccttttgagaatccatgagaatgtatttgatgtccatgaatatctggaaggcctgaaagaaaacaaagatgcagcattccgtgaagcctatcagaaggataaggcagtttatgcgctgccgcagtcataaggaggacaaaaatggcaacaatatatattcttgaggatgacctgaatattcaggaaatagaggcttatgctctgaaaaacagcggatatcaaacagaaggttttgataatgccagagaattttttaaaaaggtgtcggagagagtgccgagccttttgctgctggatattatgcttcctgatgcggatggactggacgttttgagaaagctccggtccatgccggagacaaagaagttgccgattattctggtgacagccaagacatcagaaatcgacaaggttaaaggactggatgtaggggcagatgactatattaccaaaccctttggtattatggaactgatttcaagagtcaaggcattgctgagaagaagtgcttatgtggaagaaaagaaattcctgacgctgggcaatgtatttatggatgatgaaaagcatgccgtatatgtcagtgatcaggtctgtgagctgacctataaggaatatgagctgctgaaacttctgatgtccaatgcagggattgtgactgcgagagatacgatcatggagcgtatctggggcattgatttcgagggtgaatcgagaactttagatatgcatatcaagaccttgcgtaaaaaactcggtgaggccggttctatgatcaagactgttcgaaatgtcggctatattatgtcggataaggagaattagaaggccatgcgcggaaaaaagatgaagcacaaaatatatctgcagttttgtctgatcgcggccctggccatccttattaccacaaccattgtgacggcactgttttatcagcgttttaaagcacaggttttcagtgatgtgagaacatacgcctatgttttgaccagtgtggatacatatgatgaagcaacgctgattcaggaagtgcatcagctggataatcttcgtgtcacgattatcgacaaagaaggcaaagtccttttggataccaatgcggatatcggcggcatggaaaaccacagcaaccgtgaggagatcaaggcggcgtttgaaacaggtgaaggtcaggctgtccgtcagtctaaaacagtggcaaaatctacattttattatgctgtgcgcatgaatgacggcaatgtgctccgtgtggcgacggagacaggcagtgttctcagtattgtgcagggaatgctgccgatcatcgcggtgatggtggttattttgtttgttatctgtacattcctgggacgtctgctgacagacagtctgctcagaccgattgaacagatggctgaaaacatggattatgtcaacgaaattgcggtttatcaggagatggaaccatttattgatacgattcgcagacagcatgaagatattttgaaaaatgccagtatgcgtcaggatttcacagccaatgtatcacatgagctgaaaacgcctctggcggctatttcaggttactcggaactgattgaaaacgggatggtatcggaaaaggatattgcccggtttggtggtgagattcataagagtgcagatcgtctgctgacattgatcaatgacacgattcgattgtcagagctggatgcaacgacgcaggatgtggttctggaaacggtagatctgtatcaggcggcggaaaactgtatggatacgttggagatgagtgcgaaaaagcatgatgtgacactgaagctggaaggtgagtcctgcaagattcgtacagagaagggaatgactgatgaggtaatctacaatctctgtgacaatgccattcgatataataataaaggcggaagtgtgaccatttctgtcatgccggtggataatcagattgtactgtcggtcaaagataccggtattggcatttccaaagagcatcaggaacgcatttttgaacgtttttatcgtgtggataaaagccggtcaaaatctacaggcggaaccggtcttggacttgccatagtgaaacatatcgtggccagaaacggtgcacggatggaactggccagcgaggttggaaaaggaacagaaatcaggatttattttgataaggctgcatgatatatgcggccttttgccgtatcaggagagaaatcatatttgtttataaaaaagacagattatttaggtaaaatatggtatgataggaacgtaatgcatagataacgatgaatagatgaatgatagatagatgatggaggaagaggtatggcaaaaaagaagaagtcggtcaaaaaaggtctgatcattggaatcagctctgttgttgtattgctggcagcggcctatgcaggtgtgggatattatttccatgaccatttttatccgggaaccgtgattaatgagacaaatttttccctgggaacggtagaggcggcagaagcgaaggttaaggaggaagcagaggattatctgctggctgtccacgacagagaagaccgggtctcttatatcagcggatcagatattgattatcattatgaatccgatggcagcatccagaagatgatggatgatcagaacagtatgctgtggcctttacatataggcaaggagcattctcatacagtagaggtaaaaatgacgtatgatgaatcaaagctggtgacattggttgaagccatggattgttttaaggaagagaacattgttaagccggaagatgcctatttgaagtatacagagaatggttatgagattgtccctgagaagcaaggaagtcagcctcttgaggagcagattatgttggatgtgaaggcggccattgacagccgtcagtctgtcttacggttgagcgacaacgactacgttcagccgtcagtgacatcagatgatccaaaactgcaggagaagctccaggtaacagagaaatacaagaatatgtcgatcacttatgagatagaaggctcagagcaggttctggacggcacgaccattttgtcatggctgacgattaatgatgatctgtccgttacggtggattccgatatggcggcctcttacgcacagcaattggcttccaagtataatacatatgcggcaacaaggtccttcgaaacaactgcaggggatacagtcaaaatcggcggcggtgattacggctgggttattaataagaaaggggaggctgcacagattgttgaggatatcaagaatggtgaatctgtgacaagagaaccgaaatacgagcagagagcttttgtggaaggcgcagatgatattggcaatacatacatagaaattgactatacaaatcagcatctctggtattacaaagatggctctcttgtggtagattcagatattgtttcgggtaatcttaataacggcaatggttcaccggacggtgttttcaaggttatcagcagacagagtccggcgacattgaagggcgaagattatgaatcggacgttacgtatttcatgccgtttgcttacaatgtggggttgcatgacgcaagctggagaagctcttttggcggcagtatctataagaatggcggttcacatggctgtatcaatttgccatatgatgcagcggacacgatttataagaatgttgagcttggtacaccggtggttgcttattaccgggaggatgtgaaactgacttccaataatgctaaggtttccaatgcatattcttacagcagtaaataacaggagggaagatacatgtactttctaattggtctgggaatcatcgtaattattgtctatggcaatatgctttatgatcgaatcaagacaaagaagaataaagatacgacagatgtcgagaagtctgcaggtacagcagataaccattttgctgagcaaaaggagacgaaaggtcagaagactgaaatcaataggcaggcgccggatcaggatcaatccgggagcatggtcaaaacagcagcgaatattgctttttcaggcccaacgctgacacagatgattgcggatgatctgaaacagaagaagcatatattcggcctgccgttaactttgtgtgaagagcggggagacggtcagctgatcgctttggatcgtgaggacaatatttatgtcattgagactgctcagagggcagattatgaggagttttatctgcagatattggatgatatggcggttcagagaaaacgtattcagaaaaatgcagcagacaggaaagtctatgcagttgtgtgtgtgacaactttgcctgaaacattgaaattggcagcagaaaaggacaatgcgattcgaattttcagttatgaattgaattttcgaaatgtcatgtagaaaaatgttgctaaattgttaattaaaaatcttaaaaaactctaaaatctattgcgaaaatattacaaatatattacacttagcgggtgccgtgtgaaaacggtagcttgggatttgttttcaaatccggaatattaaattttgcgaggtttttagagaatgaagaaatggatgcttttgctgagtctggtgttgatgatcgtcattgtaaactgcggtcaggctcaggcggcagaggaaacagccacgaaagatattacttttgaagaattgaatgatgaaaatgtatttatcaaacagtcaagacggggaacctgtacactggcgtcttcggccatgattatgcgcagggcggcaatgctggcaggttttgagaactgggaagatattacggagagcagtgtagggagcgttgcatggagagaaggcgtcggtatttcatggacatttacgtatgatggtgtgactatgacgcatgattatgtatcctctgtggaggatctgaagaaactgttggaagaacatccggagggaattgttgcctatgattccaataagcctcatgccattgcgctgacggactatgatgcagagacagatactttctactgcagcgaccctgctgagtgctgtgcgaaagcgagagtgccggtttcagaggcgattatttcactggagaatgtggatgtggtctggtatgtgacaagcccatcgaatctgagtgcaccggttatggctgctgcagaagcgaatgaggcggaagagaatacagaagcacagtcagtgattccggaaatcgaaacagcaccagtgacaagtcttgacaatttgagtcatacagaattgaaactggagatgaactaaatgattaagatgatactggccattggccatattaattacgataagtttctgaacaatatgctggagatggccaaacagcatccggagcagatgggcggtatgaaactgccgccgtttacggctcagatgatcaaaatgctgcctgctcgtaagaagaatgaaatggttgcccaggcattaaacagcagtaaaggcaaagtggagcctcagattgaacagcttctggccccgattacaggtccgatccagctgaagaattttgatattcagtgcggcggtaagcgggatgcggatgaagtgactttgacggtggaatttgcaggttatgactgcgggtatgtggcagatcacatattgccgttttactatatggaagcaacagcaccggcatttcttggtccggaatataatggaccgacggaccttgcgtctgtgcaggcttatattaaggctcaggattataagaaagcacagtttcttattgcaaagagcatgagcgtcaataaagcctacattatgaacttgctgcaggacaaagcgaagctggcagagattgaactgcaggtgaataatttacgattaatgataaaataaaaagaaggggatgcgaaaaactcgattgagttttttcacatccccttctttttttaatgaataaaatctttcatgttcggacggacagtttcttcataaaccagctcggccatgcaagtagcgaaatacttacgattggcgataagcagcttcttctcatcatcgacgccgagtttctcagccagccagtctttcatctgggcttttaattcggcgcgttccggttcatactggaaatcgtctgtcttcttgccttcccatgcagcaatacgtgtacgaagttcttttttataaatatctttcatcaggtccattatgtaatccccctattttatagattccatattcaaaatgcatggcactttaaatgtttatcaatatacatatctattttaatatgaatattctgataatgaaagatatatttgtatttttttgaaaaatctttcgataacagatattatatggtatgatggaatctgtagtttgaaagcagatgatttttgatatagaaatagatcatgtaatcggaggatgaaaatggttattaaagaaatggtacatattaccccatatcatttggataggatgctgcatatctaccttccggatgattacgaggagagcgaagcgcgatatccggtcatgtatatgtatgatgggcacaatcttttttataatgaggatgctacctacggtaaatcctggggactgcaggaatttatgaggcagtgggagaaccagctgatcattgtcggtattgaatgcaatcatgagggcaacaagcgtctggaggagttttcgccctatgatttcaaggattttgacggacaaaggattcatggaacgggcaaagtctttatgcagtgggtggtcgatgagctgaaaccgctgatcgatacgcatttcagaacaaaaccagagcgggaatataccggtatcggcggcagctccatgggcggattgatggcttattatacagttgtggcccataatgatgttttttcaaaggcagcttgtatttcaagtgcggtcggattttgttatgatgccatgcgggaagaactgacatcggccggaccgatgcttcctgataccagggtttatatgagctggggaagtaaggaatcaggacgtaaaccgggactggtcaaatatacttgcacgaatctggagttcagtcatctgctggtagagcggggagccgtgacgtatccgtatcttcaggcctttggcggccattgtgaggccgactgggagaagcagaatgcaatctatatgccatttctgtggaacggtgtatttgaggatgggatggaataaggaatgagtgcaatttttgcggtggcagggaaactggtgacactttttatttatgttcttgtgggatatgttgtcagcaagagaaagatgatcagtgagggcttttctgctggtatcagtcggttcttgctggtggttacgatcccttgccttatattgtcgacttttgaaacagattatacctttgagaggctggtcaaggctggagaggtgtatgtcatcagtttgatcatatttggagcgagtattctgatcgggtatctgacagcctggattttcaggatttccgaagagtcgaaaagcgtctggatttattcagtgacttttacaaatcatgcatttatgggatgggcggtgatggatgccgtttttggcggagagtccattttttatgcgacatttgccaatctggcattttccacctatgcctatacttatggtgtctggctcatgcggagtaccggaacggaagccggaaagaaacattctatgaaagaatatatcttaacaccggtgaatgcagccattgttgttgggttgatcatgtttatttttcagctgcgctttccggcaccggtggataatgcagtacagggaatgtcatccctgacaacaccgatggccatgctttatgtaggaacgattctgacaaaaagcagcatcaaagatgttttcagtgactggagaacttatgcctgttcttttgtaaggttggtgttgattccgttgttggtgttgatgattgcaaggccgctgattcatgacccgatgatttacggagtgcttgtgattggacatgccatgccggtggcgggtttctgtgcgatttttgcaggagaatacggcaatgatgtggtgctggcgtcgaaatttatatttattacaacgctgctatgtattattacgattccgatattcgtgatgctgctgtaatgtagatggcgcaagcggcggatgcaggcgctgtaatgggaaggtcacattacgtgcaaaaatttttttcaaaaaaccgagtaaaatcatatcttcaaaaagatataagtagtgtaagcagttagtgaatagcacacatgtttttttggaggtattgctctatgaaaaaaataaattatggttcatttgtatgtgaagtttcagttgaccctgactacatgcttcttaagcacggtttgtgcgattatgaaagagacacgattgcttatgcggtagaacgtttttttacccgctgcagaaaagccggtaaggcatgcacagaagaaagtatacagattcgtgttgccaaaggcaaagcaaaaagaaagcacgcatttatgtatcttgcaccggcaattttgatggaactgccggaaggctgggtgcgcgtctggggcgaagtgaatgctgcaggcgtagaaattaataaaatagagatattaagagaacatccttgttttgcagaatatgctgcatagaaggataaaaactcaaggctgtcggagaaatccggcagcctttgctatctggttggatagttatttggttggatatatcatgggatgccgggcgaaatacccgacatcccatgtttagaatgaggagttatcagatttcaatcttggcgccaagcagtttgacgaattctgcaagaatcgctgtatcgccaggccaagcaggtgctgtaacgagctgagcagcttcatcaacaacagcctggtctgcaggaacttcaacatatgtaccgcctgcaagggtgatatcagggccgacagccggataagcagtcgctttcacgcctttaagaacgccggcagcagtcagaatctgcgggccgtggcaaatggaagcaacaggtttcttagctgcgaaaaattcctgaacgatttcaatgactcttggattcagacgaatatactcaggagcacggccgcctgtaataaagagaccaacataatcagcagtatttactgtgtcaaaatcagcagttaatgcgaaattgtgtcccggcttttcggtgtaagtctggtcaccaaggaaatcatgaacggctgtcttaacaacgtcaccggctttcttgtccgggcagacagcatcaacctgatagccgagcatagacagtgcctggaaaggaaccattgtctcataatcttcagtaaaatcaccacaaagcattaaaattttcttagccataaagaaacctccttcaacatttgttgagataatataggtgcaaaatgtattgactgcttaaaattaattaatgaaatgtcacataattatgcatctactaaatattatatcatattattacatggaaaatgattaaatatttataaaaatattggtgataagaaaaaggtgccatctggaaataggtatttccagatggcacccgtaagtaatattattgtataggataaggtttatacaggcaatatcgcaacatttacaatttcctcaatttcggtggtacttttattcataatatctgagatttgttctagtgaataaccttttttatacatatttaatatgaactgttctgtcatctctttggttacttctttagttacgcgttctgttgtttcacgaattgctctttcttcgattccttctcccagattacacataatgttcacgtcccttctaaaatcatcatttaacggaatatgatattcgcttttcataatttcaaatttggtgttgatggctagtttatctgataatagtgttcctaataaacggtgcagctcatacttttcatcttgttttggtatttctcgagttattccaatcagaacgatattcagtaaatcttgtgtgcctttccatttgggattgcctaagatattctcactggaaagataatatcgagtcaggctgttcgcatccatatttagacaaatccagatgctgaagacatgctttaaatcatcataattcgagtgttcaaagtcgcggtctttttgtgaagaaatcattctgcttacataataaatgcttctgtttaaaagatgatagtcctttggctggtctttttgtatctcaacattaataatcatttgagccagtccgtctttcattcgtacataaaagatgatatcaaagcgtatcgttccttcattgatttcactatcttctgtatttaagccgccgactcgtgtattcgtaggtattgaaatgtctgatgcattaattacgtcggttatgttttgattgacatctgtatttgaattattggtgttctgtctatttgtcatgcctggactgactggtacagtacctatctgtggatcgccttctataagtaataccacttcttctggcttcattcccttaaattcctcaacagttctcaccaagatatgtgacagaattatcttctgtccaattagtcgtttagcacatgcatcatattgtgccttgctgcctgcggctgtgattgtattcactattgcggtgttcatattcagcatccctctctgtgttctctttttgttaatagtaactgtaaaaccactcaaagattccacaaagagctcgctgcctattatcattataacgaagagaagctatggaatcaatctaaaaattcagcagttgtgaaaactgctgttgtcgtatattctatagaattttctctttcgtacaatgtcaatgacgaacatttgtttatattatagcatgtgtttgattggcattcaatatgttttgtgcattatgagacaaagaaaaaggcatcctgccgttcggatgccttttcttaagagagaggattgttatgttctaattgttttctggctataaggctttctcaaccttatgctcatactatacacgaaagttctaaaaatacaatagatgtttattaataaagtctaaagtatttctgggattttacgaaataaggtattaaaaatttttagtaccttatggtataattaataaaaaaggcatcctgccgttcggatgccttttcttaagagagaggattgttatgttctaatctttttctggctataaggctttctcaaccttatgccaatactatacacgaaagttctaaaaatacaatagctaattattaataaagtataaagtatttctgagattttagaaaattgcatctaaaaaatttggaggaagtgatagaggatgacagaagatgagaagtttatgaaagcagcgctggcgcaggcgaagaaagcggcggctattgatgaagtcccgattggctgtgtgatcgtctatgaagggaagatcattgcccggggatataataagcgcaacaaggagaagaataccctgtcccatgcggagatgaatgctattcgcaaggccagcaaatatctgggagactggcgcctggagggatgcacgatgtatattacactggagccctgtccgatgtgtgccggagcaattgttcaggcccgtgtggacagagtggtgatcggcagtatgaatgccaaagcaggctgcgcaggttctgtgttgaatgtgcttcaggagaaaaggtttaatcatcaggtagaattgacgaaggatgtgctgcatgaggagtgttcatccatgctcagcggatttttccgtgaattgcgagagagaagaaagaaggaaaaagagaaatgtatttagcagattatcatatgcattctaaatattcttttgatggttcagaagaactggatacgatctgtcagacggcgatcaggagaggactgtcggaaattgcgatcacagaccatatggatatttatacagggctgccttacgatgagcagatgaattttgaagtgcccggcggtgaacagtatcatatggatgtttcagggttgtatgccggacttgttcagatgaaggaaaagtatgccggacaattgaaggtgcgcatcggtgcggagcttggacagccgcaggtgaatccggaagcggcggcgctttttatcagggattacggtgatgtgttggattttgtcatcggttctatccataatatggaaaaggatctggatgtctattattatgattttaccaaaatcgatgtggcgaaaatgtatgatcattatgtggactggctgctgaaattgtcggaaatgggcgattttgatgtgatggggcatctgacctatccgctgcgctatatgtttgagcgtaatcaactgcgtcttgatctgagaccttatgaggagaaatttcgtcagctgtttaagaatctgacagagaagggacggggcattgagttgaatgtttccggatattataaggccatgcaggatgccatgccgccgatgtcgattttgaagttataccgggaatgcggcggtgagatcattactataggcagtgacgcccacaaagcagaatatatcggcttttatcagaaggaagcccatgaaatgctggaaacggccgggttcagatatctgacggtctttgagcataggaagccggaattcattaaactgtagggttggaatccgaaaggagcgggctgtggcagactgaatggatgaaagatgtcaatatatttttgaggttgactttgagcagctatgagtacattagacaaagagagtcgaatgaaaactattgcatgaaatgctttcatgagttacaatggtgaacagaaccataaattcgttagcttatactaagaatgcggacggataagatgaggaggacacgaagatgtttaaaatcaacgataattatcttaaattaccaggcagctatctgttttcaacaatcgcgaagaaagtagctgcatataaggaagctaatccggagaagaaagaccagatcatcagccttggtatcggcgatgtgacactgccattggcaccggctgttattgcaagactgcacagcgcagttgatgaaatggctgttaaggagacatttaagggctatgcacctgatctgggttatgaatttctgagaagcgcgattgcacagcatgattacaaggcccgcggcgttgatattgccattgatgaaatctttatcagtgatggtgccaagagcgattccggcaatatcggggatattttttcagttgataaccgtattgcggtatgtgacccggtttaccctgtttatgttgatacgaacgttatggcaggcagagcaggggattacaatcctgcaacagagagattttccaatgtgatctatatgccttgcacagaggagaatggctttgcaccggaactgccggaagaaacaccggatatcatttatctttgctttccgaataacccgacaggcgcaacgattccgaagacagagcttcagaaatgggtggattatgcccttgaaaagggtgcagtgatcatctatgatgcagcttatgaagcctacatttcagaagataatgtggcccatacgatttatgagtgcgacggtgcggacagatgtgccatcgagcttcgaagcttttccaagaatgcaggtttcacaggcacacgtcttggtttcacagttattcctaaggcgcttaagtgcggcgatgtgacattaaacagcctgtgggcaagacgtcacggcacaaagttcaacggtgcaccttacatcattcagcaggccggtgcagctgtctatacaccggaaggtcaggctcagacacaggaacagattgcttactatatgaataatgcgaagattatcagagaaggacttgcagcagcaggattttctgcttcaggcggtgtgaatgcgccatatatctggctgaagacaccggacaagatgacttcatgggaattctttgattatctgctggataaggcgaatgttgtgggaacacctggttcaggcttcggaccaagcggtgaaggttatttccgtctgacatctttcggctcttatgagaacacacttgaagcggttgaacgtattaagaaacttaaataatgtgcagaaattcggtcgggaagtacgtctgcgcagcagagccgaattccgcatcagaacttataggcaagttctgaatacttatgatacagcggttcagagatgatttctgaaccgctgtggtttctgataaagatgaaaatgccgacagttagttcagaagaattatcaatgtcggaatgtaaaggggaatgagaaatgctggatgaaatagtgacggtggtcaaaaaatgcggcgatattatattgttcgcagatggtgccgagagaaatgtcagttccaaggagggacgggcgaattttgtgacaaaatatgatgtggcggttcaggcctatcttgaggaggaattgctgaaaattctgccggaggcggtatttatcggtgaggaaggagaacacagcaaagcaattggtgaaggttatgcatttattgtggatcctatcgatggaacgaccaattttatcaaaaattatcacagaagctgcgtgtctgtgggactggcacttcatgggactatggaaatcggcgttgtttataacccatacagtaatgagatgttttatgcgcagcgaggaaagggagcctttttaaatggtcaaccgctgcatgtatcttctaaccgactggaagaaggacttgtatgtttcgggacatcaccttattatgcagaattaattgatcagacctttgatctggtgaagacactgcatagggcaagtctggatgtgagacgaagtggttccgctgcattagatttgtgtgatattgccagtggacgttgtgaattattctttgagtgccgtctgtcgccttgggattatgcggccggttcattgatcgtgcaggaagccggcggctgtatcagccgtatggatggtacgggaatctcacttgataaggggtgttcggtactggctggcggacctgcagcatgggaagattactttaaactggaaggacatatggaactgtcataataggcggaaatagtttggaagatatttttggaaacgatgtactagcagctggttttcagagttaaattcaggaatagacccaagatggtcgggagtagcgtatgagtaaagtaaagattataagtgatagtacctgcgatctgtcagaagaattgctggcgcagtttgatgttgcagttcttccgcatcccattgtcagagatggcgagctattgcaggacaatgtgaccattaccccggatgatatttacagacattatgagcagacaggcagattatgtacgacatctgcgccgaatacctatgactatgagatgtgctggaaaccctggctggatgaaggctatgagattgtacactttacaataagttcagagatgtcaacagcctataatcaggccatgcttgcggcagaggaaaccgggcatgtttatccggtggattcaagaactctttcaaccggtatcggtcttcttgtactggaagcctgtgatctcaggaatcagggctttgctgcagaagaaatcgcggcaagggttcgtgaagactctgccaaatgtcaggccagctttctggtggatgtgatcgaatatctctggaaaggcggcagatgcagttcagtggcggctatcggagccaatatcctgaagttaaaaccgcgcattgacgtattaaacggcaatatgctgtctacaaagaaatatcgcggcaagacggcgaaatgttttgcggcctatgccgatgatatgctgaaaggcaaagataatatcagacagaaccggatatttattactcattccggcattgccccggatatcattgaactggttcgtaccaaaatcaatgaatggcagccggatgttgagaatatctatgtgacccgtgccggaggaaccatttcttgtcattgcgggccgggaactctgggaatcctttatatgtatgaataaaaatcagactgaagatatgaatgcagcaattgactgcatctatatcttcggttttctgtagaaatttagagttggacattcaaacaggagattgctaaaaattctgtaaaaaagtcggtgaacctccgagctatttttgacaaaaataaaaaagccagtaaaatcaaggttttgcgggaatttactatgaagaggttgaccgacttttttggagaaaaagattgaaaaacagtagaaataaggtataatgaaaacatgaaacgcagtaaacactgttgttgaaccgtacctaagagtgattgaaacaaatggctctttcccatctggaagaatatcatgcatctgctctttggttgaaccatacctatgagtgattgaaacctaccaaatttagtcatgtttcatactcctcttcaaaaaagttgaaccgtacctatgagtgattgaaacatgatagtgagtgtcataaaatctcctcctaaaaatgtgtgttgaaccgtatctatgagtgatattttgcttttgttgaactcattgttttatacgaatactatgaattgtttcgttaatcttcaaagaaaatacgaataaaaaaatgcttcagctcataaagagttgaagtttttttgtgaaaaaattctgactgcaggaggtagggatgtatttacaatggaggagatgttgtccaagagaaatcagagagatgcttttaatcatttcagtatgaaaaagaatgggcgtggcgttgatggtatgcagatttctgagctggaggattactggaagattaatcatgagcagatagaggcggatcttctggctgggaattatcagctggggattgtgaaaagctatgagatgatcgatggacgcggcaaacgacgtgttatatgtagtctgaatgcgattgatcgttttgtggccagattattagcacagaaattgagacgttatatggaaccggagttttgtgagaatagttttgcttatcaggaaggcaagggtgttgctgccgcggtagaaaaggcatgtcaatatatcaatgagggatatacgattgtggcggaaatggatattgaaagctattttgacaaaatatatcgtaaatatttgaatcatgtctgcaatcaactcgatgaataaagtacgccagtgcttcgaggtgtgcggtaaaatctccaatagccggaagggtgaggaggtccggttgaccggagcagggatacctgcttcgggaggtcgtcggggttcagtgatgaatcccggggagacggaaaccgtcaaggaaaacgcatatcgcagagatgttcgcacttaattgcacggaacttccgggtgcagcaatagacgcctgcggtgcaggaataagcctaaggggtatcagtgtggcagctggtatgacagaggtaaagccaataatgcactctgctttgacggtggagaaatctacctataacggaagtagccggtaaaagtagccgtatggcagaaatagtgaggaaaaatctgaatggacggtgaaatttgcaggtagccattcctgtgcaggcttgggcgaaagccggggtaagaagttannnnnnnnnnactcagacttatcttcctggtggcagaatataggtgaaggacatggatgtacggcgaaggccggattgcgggtgtgattgagatattcaaaagaggcttcagtttttgtgagaggactggagctttttctttgattaaaacaaaagagcttctggttgccgagggtgctatccatgcagtccggctgaaacagaaatccaaaaccaagcgcaaaaagaaaatcaccgccgcaatctacgaataccaggcagactgcgacggcgaatggggcgaaatatcagttgattttgagaacggcacagcagaaatcattcggcttgctgattgggatacaattaaaacgaactggtttgccaatgaggcgatccggtatattttatcattgtcgcctgatgctcttaaaaaatatatgctcgtcccccttgagccgccacttatatcctgaatccttacaacaactgtaagtggtatttgctgtgttcccatgctatcattttattacaaatgataggaggtattcacatgaaacccattttgaatattgaaaatttaacaaaaatctatggcaatgtgccaagtcaaacaaaggcactgaatgggatcaccttccaggtgatgccgggagagtttctcggcattatgggaagcagtggttccggtaaatccacgcttctcaactgtattgcaactgtgattcagcccaccggtgggagcattcaggtggaaggcgatactctgcaatccctcaagggaaaggctcttgcagagtaccgtggcaaaaaagttggttatctattccagaactttgaattgctggacaacctgactggcagggaaaacatcctgctcccgacttccttgcatggggtatccgaaacagaaagcagccagcggctgaagcagttggctgactatctggaaatcactgatgttctggataagtttccgcccaagatgtccggcggccagcgtcagcgtgttgcggcagcaagggctctgatcttacatcctcaaatgatccttgccgatgaaccgacgggtgcgctggattctaagaacgcaagaagtcttatggagaagctgtccggcctgaatcgtgacgaacaagctacgatcctgatggtaacccatgattccaatgccgccagcttctgtaagcgcatcctgttcatccaggatggcgtgatctttcatgagcttcggcgtggagacgaaagccagcaggagttctacgggcgcatcctgaaggtgatggcgcaactgggagggggcagcgcaaatgttctctaatctcattcttcggaacagccgccgcagccgaaaggaaaacagtctgtttttcagctccctggtgatttctattgttgccttttacatgattctttccatctccactcaagatgtgatgctctttttgcagaaaatggagagtgacgcagttgacaaactcctgcttctgattcctgcgttttatggaatgaccctcggtattctgttctttttgatctattttgcctgcaagtatcagttcgagcgcagacggcatgagtttggtgtttatctgatgttggggatgcgtagaagtaaactgtttggtatgcttctggctgaagattgcctgaccagtattcttgccatgctcataggcttacccgtggctgtggtgctttcagaaattgtcagtcttgtcaccgccaagctggtaggcatggggatcatcggtcatcagttttctttatcctggtctgcgattgaatggacgctggcaggatttctggcaattaagctgacggcacttctgattttgagtggacgaatcagccgccaggagatcggtactttgctatcccagccaacgaaccgccccaaaaagcaaatgccatctgttatctatggactggctgctatatgcggaagtgtgatgttggcagtggcttactacatggcgattcagggaattgcatggacaaaggtaagtatgatgggactgactttgctgttgggcatagttggtacaatgctgcttttctatgggatgcgtgcgctgattgctttgattgttaagaaaggaaaaggaaataagcagcttcatgtatttaccttccgacagattcaggagaatgtcattcatcagtcaaactccattgccatcagctccctgctgattctggcggcgctgtgttgttttggtgctggcgtgggaattgcgggaaccaacaatctatccaccggtcatgtaattgactatacctttgaagatcataccgtagaagattcggcgcaggttcttccgaatataaaggcagccctgaaagaaaacggtttggaaaatcaattttcagagctttttgaaatgagggttgggcgtattcgcaccacagaagattatgataatgcctacagcatggacgctgttatggactctcttcggagcctgccccagtcggaagaccgggatgtccttttgaacaatcttgattatgccacatacccatatttgatttgtttatcggactataatcgtttgttgaaattgtccggcaatccggctctccaattaggcgaaaaggaggcagctgtctatattgatacagagcttactacggtaagccgtaccgcaatgctgaaccaagtattggccgggcatcccaaggtggaactggatggtagtccgattcatcttacaggagaggttcagtctgtgaatttggtcacggaccgttctataaccttgtcctttgcattgattcttccggatgaagcattcctatattatagtcagggaatgtatgatacctatgtcaatgcggtgctcagtgagcaagctctgaatggaaatagccttatgactgcatatttggatttgaacgagaagctggacgaaattgacattgaatatgaaagctatcttcagaatatgggtcgtcagcttttctacaccatagcatccagttatattaccctctatcttgcgattgttttcctggtagttgccaacaccatcgtgggtgttcagttcctgatgagtcagcagaaaaccgggcgcagataccagactctgatccgcctgggagctacttacgaaaccctttgccagtctgctggaaagcaaattacctggtttatgggacttcctgtattggttgcggctgtcagcagtctgtttggagtcagggcgttatttacagggatactctcgtcccgaacccgtgggacagtgtctgaaatgctgcttgtatctgctgctatgattttgctgctttgcgtgatagaatatatttatatgagagtggtcaggcgatccagtgatcggtatttgctgacactgatgcagccgcagagagaagaataattgggaaggaggtgctgtcatgaaaagaattgctgttgtggaagatgaagtctatatgcgggaagaactctgcgatatgctccaaaaggacggctatcttgtggaggcaattaccgagtatgaagatgccgctcggctcttggcagccctccgccctgaccttgtgatcttagacctgaacttgccggagatcagtggctttcaaatctgccaggagctaaagaataaaaccgctatccccgtcctggttctgacttccagagatcaggtaaaggatgaactgcaagcgttccagttgggtgccgatgaatatttgacgaagccgtgcagaaaagaccggcttcttgccagggtatccaatattcttaaaaggtatgaaggccgtaccaatctcatagaggggccagattttctgttagaccagcagacctacacactttatattcataatacctctgtggtgcttccaaaaaatcagggaaaactgttggttgctcttctgtccggcggtgatgctctggtcacgacggggcagctttgcatggcactatggggaaccacagaatacatagatgaaaatgccttgcaggttaacctgacccggctgaaaaaaacaatgtccggtcttgagatgaagcaacaaatcgttgcggttcgtgggatgggctatcgtctggaaacgggggtggctccatgaagcggctttggcgcatgatagaacggtactacccctggctgctgttgctgctgggcgtggattgcttttgtgctatcattctttggatttctgacattcgggcatttcaaaccttgattgggttagtagttctgacaagcatccttctgttttcagcgatcctgtttgcgctaaacaagcgggagaccacccgccgggagctgttccgggatttcctcagtgatcctaccatctgcaacgaggaacggctgctcagtgccatcagccgggaagaaggagaatctattcggcttctggcatcagttttacaggaacacaaaactgagaacaacagcatggcagatgccctacaggactatgaagaatatgtggagggctgggcacatgaagcgaaaacgcccctatcgttgctgaccatgctcctggataatcggagcgacgaaatatctcctcccctgcaagcaaagctggattatgtccgcagtcagcttcaggaggatgtcactcagatgttatactatgcccggttaaaaagcagtacaaaggattatcagtttgaggatatcaatttgaatgactgcttgggggaagttctggaggactatgccccacttctggaagaaaagcagtttgtaattctcaataaactgcaatctgaaacagtctatacagaccgtagagggcttcagtttatgttgggacagatcgtgagcaatgccatcaaatatagcagcgatagtcccatgctaacgatctccatgatacattcggagaccgcagatgtcctttctgttgaggataacggcatcggtgtaaaaaaatatgatctgccgtatatttttcaaaagggttttaccggggattctactgacagcagaaagaaggctaccggtatagggctttacctggttaagaagatggctgatgatctaaaccttcgtctggaagcagcttcccagtggggaaagggctttaagatagccatcttctatccaaaattgagatccagcggaggaaaataatataaacagaaaaacgcccgcaggattttctcctgcgggcagcgtgttgtcagctatcccaaggcttgtattctgttacagttttcaaataggtttcgggatcgccgttcaagataaggtctgcatatccaatcgggtcattgtagatcagatagtccagctctgaccgctgatacatattgtcagcaatctcgttctcaacggcgatagtgtcaatcgcaatcatactgccgtcgctgaatttcagttccacacagcaattatccatattgtaggcacaagatattaaggttttcatggtatgtcctccataattcgtaatataaagcgaaaatcccgtctgacttcctgttagaaatcagacgggatttgtccgtatgcaccccggaaaccgtcagctaacagttgataagtaaattagttccttatcactgttaagccaaggttttgcaggaatttactatgaagaggttgaccgacttttttggagaaaaagattgaaaaacggtagaaataaggtataatgaaaacatgaaacgcagtaaacactgttgttgaaccgtacctatgagagattgaaacttgctaagttcctcatcaaggtttctaagacacttgttagttgaaccgtacctatgagagattgaaacattacatctatctcgttttccttaaatggataataataagttgaaccgtacctatgagtgattgaaacctatttgaagaattcttcagccacaaaaatataagtttcgttgaaccgtacctacgagtgagcaatgtgctctatacactgtaataaatgtggatgcaaaagagcgtaaatctgagcaattgatgtcagttagacagatatgaatagttcgggttttttatttttttgttgcgtttatgcgttgtgtattaattgtaaaaatctgccgttacgggaatagattcggagacggaaaatgctatgatagatacatcaaaagggcttgaataaaaatcttcattgtctgagttttttcggacagcgagcagatattatagagtttgaataacggactaaaatgccgaaagcctgtatttatgcgggtttccggcatttgttttatcaaatggctctagtttggctctatttgtggggagagtaatgtataaatatgatatgtatttcaaggtaatgattggtaggtggttaagtggatattttatttaaaaatgatgattttgtattttcatacagagttggcggtatattgatgcgtaatggtaaaatcttgttacagcgtccaaagaatgatgattatgccattattggcggacatgttgcggctatggagacaagtatggaaactcttaaaagggaatttgaagaagagcttcatgctaaaatagaggtagataatctgttagcaatcggagaaatttattttccatggggaaaaagaccctgtcatcagatatgcttatattataatgtacatctggtggatgataatattccattagatggagtgtttcatggatatgatgagctggataatgaaagaattgatttggatttctgttgggtttcactagaagatttaaagaagggtactaaggtatatcctttagagttgataccatatatccttgagccagggaaagaaattgtacattttgtttcaaaacagatttgaggagatagtcaatgatagaaaatatgaaggtagaatttggcagaacatcagatattgattcatggatgcgattagtgagaaaagtaagttggaattttccaggattagagacagagcagagtatagatgaacacaaaataatagtattgaaattcatgaatgataatcgtgctttgtgcgtgaagaacaaacaagatattgttggcgtacttttatattcaaggaagtataatatgatatgttgtttggctgttgatccagcttatcgaaaaaggggaattgcttcgcttcttttaagagaggcactggataagcttgacagagataaagatataactgtgtctacattattccaaacacagggaactggcggtttctaaaaatacctattaccgctttttaaacgaagcttcctacaactggagccgctttttactgcttcttgcagttaaagtgaccactgcttttgaccgattgacacgtcctgaaagaatcaaagtacttattctggatgattccgttatcaaaaggaaccgaagtaaatctgtagaattactggctcgtgtgtataaccatgtcgagcatcgattccagagaggatttactctgcttactcttggttggtctgatggctacagttttataccaacaggctttaacatgctttcttcatcatctgccagtaaccgcgataatgaaatcgacagtacagtcgatcatcgcacgaatggttacagattccgtaaagaaagtatgatgcataaaacagacgctgccatctgactgatcgaaaatgcattaaaatctggtattcaggctgattatgtcttgatggatacctggtttacaacagagccgatgatacaggctgttctggatacaggtctcgatactataggaatggttaaacagctgaagcagagatacagctttcagggcatatcctatacactgcctgaattacggaaatttgttgatttttccggtgccggtaatatattcggttctcttgtcgtaaggaccaaaacaggaattccggtcaagattgtctttgtacggaaccgcaataataaaagtgaatgtctgtatattttaagtacagatatttctcttgaaagcagcgagatcgtacggatttatggcaatcgttggtcgattgagtgctttttcaaagcatcaaagacattttttaagttaggcactgaatttcagagccataattacggagcagtggtcagccatacagccattgtgttcacgcgatatatcgttctagaatggatacgcaggaaccaaaatgaccagaaaacgtatggtgaattatttttcatgttcagtgaagatatacaggacatggaattaacagatgcacttcagagccttatggctctgtttgctgagcacatttccagcttatcagcagatatcacagatgtgataaaaaataaagtaactgaatggatatcgactcaagccgcatttatccaggctttatttagaaatgtctgctgggaaagttgagtgagatatatttctgaggcaataataatcaattcggcttcgccattgtaatggaaagttttggctctaaaaattttagacgagatacataaaaatgcaaaataagatgaatatgaagagcaaaatgcacaaatatgtactaagaaacagccagataaatctctccgcccaagaagcagaataaaaataatggaatttagctgttattgatgatagcaatgccggaaaagttaccatgaaccttgtgctgagaatggcgtccatcattgatgatgcttatcccgtcattaataaagccatctggtcataggcggcagcgggtctgccggcaatacggcgggcccaataagtaaagggatgttttaaaccgctggttgaaaatgaaaaaagccagaaagcattgtaaaaccttactttctggcctcttaaaattcatatatgatactattttgatactaatttgttgagcttgtcggctacttcctggtgtcggttcgggtacagatgcccgtaaaccttgttgatcatctccggagtgtcgccgatacgttcagcgatcagaaacggcgtgaagcccatatcaattagcatagatacgtgactatgtcggagctcatgtatctttatgcatttgatatcggtgctttcacagccgttttttattgctgttttaagcttctggggagtaaccagactaaacagcctgtcatcctgctgcatgtcgtaaagatgggatatatactctttcagaatatccaccaggaacggcggcagcgtgacagttcggttacttctggaagtcttgggcggcgttatatggtcagccttattaaatttatgataggttttacttactgtcagtgttccggcgttctggtcgaagtctgccagcgtgagcgcctgcaactctccaacccttagaccggtgaagaataatacttgaaaggcaaccttcaccagtggatttcttaccgtgtccagaaacttctggaactcttccagcgtccagaaattcaagcgcctgacgtctgattttcccatggatccggcaatactacacggattctgtttaagtccatagtatttaacagcgtatcccatgagctgcaccattaccacatttatctggtgcaaatgtgactgactgtagcccttgccaataatggactgctgccatttacgtataccggcgggggcaatctggttgattgctgtatccttccagtacggcagcaggtgtttatttatgatagatccccgggtaatatagcttgacagcttcacacggcttttataatctttcagaaacaattccaccaaggcggaaaatttcatgtctgattcgcccgcctgctgcgtgagaaagtcgctttcccattctttagcatctctttggagcttaaagccccgcttcatcttctggcgcttctggccagtccaatccgtataatataacttcacataccatgtattatgcttttcgtctttatataccggcattgtatcccttctttcattccgtggtgctggggagcggctttgaaatgattgaaagggtgttagatatcggcgttttaccggctccatgaaaatatggagctgtcacctgagccggcattttaccggggcagatggggggtagcgtttcgcgactcccttaaacaaagtagtgtttcggtttctattttttttagaaagcgagtctaccagcgtacttgtaagtacggcggtttttgtcaactttgatgataactattcatcctgatcggaaggggccgaggtgtcggcggctgggttctgggtgtctatagctttttcatgcgataaatatgctaagcaatttcttatatctacaatcctttttaattctttgggatagatatttgcaacattttccttacgggcaataatattttccataaatgaaaaaagcacatctttcataaaatctgagatgcttaacatctcttcaggcgtaaattcgtagagtttgtgttttttttcaagaaagagagattgaccgccgccgttttcaagttctttttcaaaactatggcttaagtcagtagcataatcattgaattctgcccattctatcaaggtatccaagtaatacatataatcatattgcgttttgtcgttaattataaacaaatcttcagtagatatgccaagttcggtcattattttctctaaagtttcttggtttggcaaccggttattattttcataattagaataggttgagtatggaatgtctaaacgtttagccatttctttttgtgaaattcctattttttttctatattccttaatcctagtacctattttcaaaatctcattaagtcccatattgtttcacctcgaatatattatacaataaatattcaatattgaaaagatatgtattgacatattcataaatgaatagtaatatgtaaatatattaaaaaatattcgatatcgaatattcaaaaggaggtacataaaatgcgagtagacagatgcaaattatcaatcgaactcatgaagcgagacataacccagaagcaactggctgagatgtgcggagtatcccgtgtaacaatcaacggcatagtctgcgggcgttcctgcaataacagaaccggctacaaaatcgctcaggctcttggaatggaactcaaagatttagttgaaaattaacccgctggggagcggctttgaaatggatgaaaggagaaagcatggagtttagagcgttcaatcaaaatgaggatgaaccggccaacggctggaccggcgaaacggtacggcatgcattgcagcagggaaagaaacttatcgttgatcagcgcggtgacatctgggaacttgaccaggaaggacgccagaaagaatactgcgggaagatattgagaaaggagaagcaaatgagcgaatacatgaacgccaaagaactggccgagatggtcagcgtatcagagagtaaagcatactgctttatccgccagatgaatgaggaattgaaagcaaggggttattttattgttcgcggcaaagtaccgcgcaaatacgcccgtgagcgcttcggggtgagcgaatgaagtatgtagcagcccgagacgagttttataaaaggcttaaacctatgccactgacaaaagagttctttttaaaaatctatggttttgagttgacatggcccggaaccgctgaaaggtttttgaacagattagaagaacttggcagcagcagggcccgtagggctatgtgtggcgatatgcaacggcgaatgctttttaaatttcaacacgcataaacacgcatgtctatattttgacttagagagcacaaaacgccgaccaaaggacagacttgataagatcttaggcgatgccgaaaagccggacaacctttatattatcaccggtgacgatgaacccgggcgaattggtgacggcttcgaggaacaaattgaattgcagttacaggctcatccggatatcaagttaattattattgatgtattccagttgatcagacgtccaaagaaagccggacaagacagttacgaacgagactatgaggacttaagggtgttgaaaagcattgttgaccgtcattcaatcggcctgatgcttatacatcatactaggaagatgaaagacccgaacgacgtttttaatgaactgtccggatcagtggccatcatgggcgctcttgactgtagttgggtgatatcaaaagatgatcgttttgcaaatgaagcgacattacatattacggggcgggatctggcgagtgaacaatataaaattcgattcaatagacagtcctttagatgggagtatgtcggaacggccgaagatatcgagatgcagcgctttcagtttgagtatgagcaaagcccgcttatttatacgattaagcagttattgaagcaagggggcggacactgggaaggctcagcaagcgacattcagaccgccagcaagtacttaggtaatgaaatttatgacgatgtgcgtaaaattggtaccgatattaacaaatatgaacctttattatggacggatggtattaaatacgatgtaaaaagaaagtcgcgtagtagatgttatatttttaatgtcattaatgtcactgatgacacacatgtcactgatgacacacatgtcattgataaatgacatagtgacgaagtatgacatgatgacatgatgacaagctgttttataaggacaaggagagtgcaaaatgaatttacaagaaattgtcgaaactatcgaagaacttaaaagcgaatatgattattcatttgacgaagctgtcaaactgcttcagttggtgggtcttaaagacattatccgtatttcagaagaaatcaacagcgtgttagatgatatcggacgagccattgaccgaaccaatgacagtataaacgccattgaagaggatatccgcaccggcaaggcctttgttaaaggcgagatcagcacttacaaccttaactagatacatattaaccagaacataaaaaggccctcagaggagggccacagccggagctgttcaagatttagcaccttcagaatagcacataaccggcggaaaggaaaggaaaaatgacgaattgggatgaattacttcagaatttgcataaatatgtagctaaagcaaacaaggcacggaataacgccgcaaatattatatgtgctgatgctgatattcttaatacagaatatgacagacgaatgaatgcattgattaaattggaaagagatgcatttgtggccggcgctgagttggttattgatttttttacaaaaaaggagaacaaacatgacgataaaggaatttgaattacaacatgcattttgtattctggtgaaaactttgtctagctggccagtggatgactatgaacaggctcggattgtagcgcattcggtgcattcggaacacgttgaacgggactacatgcagcgtgttttcgaggaagctgacaagcgccggccgctgctgatcgaaggggtggtgaaccccgagcaaaccaagagcgaaccaagagaatacaccccgtgcgggcttccagtaagacagagcacggccaaacagtataggctgacagatagagacaaagagtatataaaaagcttcgcagcagacggcgtagttcctctggatgcatacttgtgcgccctggaacatctgccggatcaatactaaagcgtcccccacctgctgccatcgttaccagagacggcagcaggacaaaggcaaatataaaaaggcatatgttgacattgaactgcctcagaaaacatcatgttgaaaaatgttgaaatactacattgaatgcacacaaacttgaagttaaaatgctaggatttgttagagttttttgcaacggaacctgacaaaacttgacattaaaatactaaataatactagatgccaatggataaaggccaagaaaaaccaagttcaaatgatggcaaaagatggcattgaaaagagtttgtggacacgataacgcgcgtgcacacaattaatgaacacgatacacgcatgagaaaagttataaaatatctttttatcggtttacaaaaaaccgataaaggagtataataaaactgctcagatatatgagtgattgtgttttttgttaagaacatgtctgtctagcatcacacaaagaagaagcgacgaagacgaaggcgcggccgatccaccgcgcttttgttgtatctgagcattaaatacctcactttcccggctggtattctccgccagccggaagagatttgtcatctgagtgcggcgacactgtaaaacgcgaattaatagacggcggtctttaaacgggtgaaatgtatggatgaattaaacaccactacagaagaaatggacggcatgaatgccgctgctgaggcttccacagacacaaaggaagtaaccccgggcactgaacagaatgattctgatcagacaccaccggcgccagaaaagaagtatacggacgccgatgttgacaggatcatagctaagaagatagcccaggaacggaacagaatgcaaaagcttttcactgaagatcagcaggaaagcgaacttgatagacgagaaagggaagtcacaaaacgagagctgcgggcggatgccatggaggcattagcacatgacgggtttccgtgttctctggcggatacgtttaattacagcagcaaagaagcatttgatgagagttataaaactttaacagatgcatttcaaaaagctgttaatgaaaaggtcagaaatatatttatgtttgatgatagggttgcacatgaagcgccaaaggtaggcacgggagcccctccggaccagtcgcgcgcggctttcttttctggcaagagataaaataaatggcaattaatttagtcactaaatttcagccctatgttgacgaagctttcacagcaggaagcaaggcatcaatgctgaccaatcatgattttaactggtcgggggctcatacaattaagattcacaaggtgaacaccgtgccgatgagcgactatgacagagcgggcaccggcgaaaatgcttccagatatggcgcactcggcaaagtggaaaataccattgaggaaatgacactgacaaaggaccgttcctttacattcgttattgatacacttgataacgatgaaacagacggcgtgctgagtgcggcggctgcattaggcagacagcagcgcgaagttatcattccggaggttgatacatacgtttacagcgtcatgactgccaacgccggtacaaaggtaacaagcgtaacgctgaccagtaacaatctctatgatgagatcatccaggccacagagaccatggataacaacgatgtaccggataccggccgtattctgacggtaacaccggctacatacagacttttaaagaagtgccctgatctggatattgactgcgatatcacagccgagcagaaagcaaagggcgttgttggcatgattgatggcatggacgttgtaaagctgccagctaaacggctgccagcgaagttcggcttcatgatcgctcatccagtggcgaccgtggcaccgacaaagcttgaagagtaccggacgcacgacaacccgcccggcatttccggtaagctggtagagggtcgaattgtctatgacgcttttgttctggacaacaaaaagatggccatctactatgaagagaacaaaccggtcgaataattcggccggctgtaggagctgatataattcagcacctgttttattgggggctctggaatgattccagggcccttttattgttggagggtatgttttatgagtaatgaagaattaattgaattatgggacgagcaccggccatttatttataaaatagctctccaatattccggatatgctgaaatggatgatttaatgcaagagggttatttagggctttactccgctgccattcgctttgatcagaacgcgggggcgtcatttcttacttatgcggccttctggattcgccagcggatgcgccgatacattgaaaactgctgcagtacggtccggatatcttccggaatggctgccagggtccagaaatacagaaagctacaatcagactatcaaaaacagtttggtcacaagccctctgctgacgagatacgggcgttgatgggaataagccggtcagaatatgacaccatgcagcaggccgtcagaatgggcaccatagcgagcctgtcagcccctacaggtgaggacgataccgttaccatcggcgacaccatcggcaacgagggtatagaggatgctatcattgaccgtatcgaccaggaggacatgaaacgggatgtacatgcagccgttgataagctgccggaccgtgaacgggaagtgatcaccttgcgatatttcgaggggcttactatggaacaggttggagagcttgagagccggagcatggagagcgtcagacaatgtcaggccaaagccctgagactcttaagaagcccgagttataggcggcctttggaatgttatgcactgtcagacaaacagctgtcagcagccatgcacaacacggtgagcggcttcaatcggacatggaccagcgcaacagaaaaggcggcttttatcggccttgctgccgatcgtgtgcgatactaatttgatactaaaaaagtgtatagactgtaaaaatggggtatttctgacagggaaaacagccaaaaacatataaaaatacggctaaaagtcagtaaaaacagcgcttctaaaccgctggttgaatgacaaatacttcatcagcgtttataataattcttgtcagcgggggacagcgatgaaatacagagtatcagagtagttgctacgtctggtctgctgacaaatgacaatttcatatttgaatatttgaatcatgtctgcaatcaactcgatgaataaagtacgccagtgcttcgaggtgtgcggtaatttccaagagccgaaatggtgaggaggtccggttgaccggagcagggatacctgcttcgggaggccgtcggggttcagtgatgaatcccggggagacggaaaccgtcaaggaaaacgcatatcgcagagatgttcgcacttaattgcacggaacttccgggtgcagcaatagacgcctgcggtgcaggaataagcctaaggggtatcagtgtggcagctggtatgacagaggtaaagccaataatgcactctgctttgacggtggagaaatccgcctataacggaagtagccggtgaaagtagccgtatggcagaaatagtttaggaaaaatctgaatggacggtgaaatttgcaggtagccattcctgtgcaggcttgggcgaaagccggggtaagaagttaggggtcgctccccgaagctcagacttatcttcctggtggcagaatataggtgaagggcatggatgtacggcgaaggccggattgcagatatgattcagatattcaaaaaagagcttcagtcttataggatatgtgatgactggagcttttctttttttgaaagacattgcatttataaaatttacacgatgtggactaattgcaaaaatatgccaccgtggtaacagccgtcaaaaagagatgtgttatgatagcagcatcagaaataaaacagctgcaaagaacaatggaggtagacatatgcttaaaacaacagaattatttatcaatgaactgaaggaacgcgatcttaaatacagagacatcagaacgcttcaggatggggatgatctggtggaagtaggatttaatctggacagtacccggatacagatcatgattttttttgatgcatcggaagagtcggtggccctcagatgttttgaggtgacccgcgtgacagaagagcagtacccgaatgcactgctgagctgcaatgaattgaataacaagatgcgctgggtcaaattctgcattggacaggaaatgaatgtccatgcagaggcagatgccttggttgatgagactaccgctgcaaaggtaacgatggaactgatgatgcggatggcatctatcgtagatgaggcgtacccgatgatcaacaaggctatctggtcctaggacatcgttatttacgaaacggcgcggtgagccgcgcggcagcccgccgctttacgccataggcaagcggcgggtatgaaaagagaagcctgatacagtgatgacagatgaggaggaacatgatgcaaacagaattattaacattgatatttgaagaagcaaaaaagcagtgtgagtcaaaaaacgattctgtcggtctgggggctatgtacagtgcaatcatttcagtaggaagagacagccatgtacttgaggggaaaacctatgatattcaggagtatgaagcgcttcggagagctgttgccagggatgaaccagaaggaacagtgatgccgcctgtgaaatctgaagacagtctgacagggcaggagaagcagctctgtgcattccgtatctggctgaacatgagcacacgctctgcagtggatgcgtatcagtatctccgccagcaggtaaagacggctcgggagactggacacccggagaagatgactgcgggaacggaacgtccgattaaggcaatgacagagacagagcatccggttaaggcagctgcagagacggagcatctggttaaggcagctgcagagaaagagcattccgtgaaaaaaccgacgatggaacagctggcagcaaagacggttcaaatccgcgaacagttgatgcagaaggtcattgggcaggataatattatcgcagaatttgccaatggttattttgagggagaattgtccgtctttacggagaagaaccgctgcagcccgaaggccattttcctgtttgcgggaagtcccggagtcggaaagagttatctggcgacagaagcggcaaaggccctggagctgcctgtgaaacgctttgatatgagcagttatgccgacgatgtttcggcttcagaattaacgggtgccggagcaaatttcaagtcaccgaaacccggcgcattaaccggttttgtgcatgaccatccatcttcaatgttgatttttgatgagattgagaaagcacatccgaaagttatcaatctgtttctgcaggtgttggatgccggtacactgtatgataataaatatgaagccaatatcgcttttggtgaaaccgtgatcattttcacaaccaatgccggcaagtccctgtatcaggatacgacaaaacacaactattcggatgtaccgaaaaaggtgattctggatgctctggagaaaaagtgtcatccggttaccggaagaccggtttttccgcaggcaatctgttccagattggccacaggaaatgttttactgtttaatcatcttacggcccatcagctttcgacgattgcagcgagaaagctgatggagcagcaggcgtctctttatcaggaggcttccattttgtcggaagatgctgaatcactggccacaacccttctcttttcactgggcggacattgtgatgcaagaaatatgactgcagcggccaaacgctttttctctgcagagttatttgaactttatcgtctggcaggaactgacagaaaagcaatggcagcaggcggcattcagaaaatccgatggcagctggatattgaccgggctgaaccgatcattcggcagttatatcatgtgccggaggacaatactttcctgtttttcggcagtgaagaagcgcggatgcaggcacagcagatgcaggaaaagggcaggatgctgtatgcatcgaatctggatgaagtgaaacagattcttcaggagcatgaactgagttttgcagccattgattattttcatggacgttcagagaaaacgtcttatctgaatgcgggagatgtgcattcagagggcagaaaatgctgggaggttttgcagcagtatgaaccggaactgccggtttttatctgggaaacagataattatcaatataatcgtgaagaagtactctcatttctggggaaaggagccgaggacattttacatatctcattttcggacaggaatgcctgtgaagcaacgcttgaccagcttcaggtgcagctgtggcagcagaaggctttggatattcttgcattcaggcatcaggtattgaaataaggctaccgcaatcccactggctttagacggtgggttaaggtagctaaaaatcagaaattattgtatactcatggcatgggaacatggaaatctaaaaacagatacaaatacctattacaatatcacattattttcgtctgcaaatataggaagaaattactggtttcgagacagatatcagatgatataaagcagtattcatatgagatatgtcaaaggcacagtgttattatcagatatatggaaacggataaagaccatattcattacatgatagagacagaaccaacaatgtctattagtaagattgtaaccctgatgaagacctatacaacataccatatatggaaaagatatccacaatatttacgaaaacaattttggaaagaacataccttttggacagatggatattttgcatgtagtgtaggaaatgtatcggaagaaatgctgaaaagatatatagaaaagcaaggttgagaaagagggtgacagtggatgttaaaggcatataaatacagaatatatcctaataatgagcagaaaatacaaattgcaaaaacatttggctgttgccgttttgtatataatcagacactggcataccggaaagaagtatatgagaaagagaaaaaatcagttagtaaaactgactgtaacaattactgcaacagacaattaaagaaagaatatgaatggctgaaagaagtggataaatttgctctgacaaatgcgatttacaacatggatgctgcatatcagaaattttttaaggaacatgcaggttatccgaagtttaagagtaaacacgataatcataagtcatatacaacaaattttacgaatggcaatatagcagtagatttcgagggaaatagagtaaaactgcctaaaataaaaaatgtaaaagcaaaactgcatagaaattttagcgggcagataaaatcggcaacgatatcacaaattccgagtggaaaatattatgtatcaattttagtggaaacagaacacgtggaactgccacatgtaaatcaaaatacaggaatagatttaggtattaaggagttatgtattacttctgctggaaagaaatacgaaaatccaaaaatcatcagaaaatacgaaaagaaactgataaaactgcaaaggcagttagcccataaagagaaaagaagtcaaaattactacaaaacaaagaaaaagatagcattatgccatgaaaaaataacaaataccagaaaagattatctgcacaagatgtcccatgagattatcagcgaaaaccaagtgatagtttcggaagatttgcagataaaaaacatggtaaaaaatcaccgtttggcaaagtttataagtgatgtatcatggtatgagctgacaagacagttagaatataaggcaaagtggaatggcaggaaatatgtcaaaatagacacattctatgccagtagtcagctgtgttcagtctgtggataccaaaatacagagacgaaaaatctatcagtaagggaatggatatgtcctgtctgtggaacaaatcatgacagagatatcaatgcggcaaagaatatactggaagaaggattaagacaaagagcataaaaggaataacaatataggacagggactgtccgaattaacgcctgtggagatagtaggttacgaggtctgcgaagcaggaagcccattggctttagacaatgggtagttcacaagtataatcatggcgaagaaaagcattggaatcgtgctgatcttattaaaacagcccgtcatgaagcggggcatgccgttgtgtgcaattatttcggagaagaaccgtcttacctgacagtggcggcccgggacaaccacggcggatacatgatgtacagtgcagccgaaggtaagggtgtttatacaaaaaaagaactgcttcgtcagattgctgtttctttgggcggtcgggcagcagaactggcttattacggcgaagaagagggactgtccacaggcccatcctctgatcttgagacagcaaccgccattgcacgaaaaatgatctgcaattatggcatgtaccatgaaattgccgccggaatcgtcatgcagaatgaagtgtctgagacggtttcacagagcattgaacaaaaggtcaatgccattattcaggaacagcttaatttgtcggttgcgattatcaaagaaaatgcagataagatggcacaactggtggatacgttgatggaaaagacacacctgaataaacaggagatacaggaagtgctgaatgattaggaggtgtaggataatggagatggcgcagcggacattgaaaacagagaaaaagcagctggaatctggctgaaggtgaaaagtgtctgtgaaaacttttgagttggtctacaaaagaattaaccattggggaataggtattgcataaaatccatcgtacaatgtatgtacggtggatttttcacgtggtaaataataaaagaaacttgcagcaggtagtttatggtggcatgcaatagggggaagataatgcaaaaatgtaagaaaaggatggctttgataatggtttttgccttgtgttttgggctttctgcttgcggcggaggcggcagcgataataatgatactgtagaaaatgaagatgatcgttgctccgatgggagtgaaagcgatatctatgattcgacggatacagtacaatatatggcgtctatggaatctgataatgacaatccggcaaagcagctgggatacagttctattgaagagatgcgtatacaggaacatgaaataattgcgtctgatgatagtgacaatacggttgccgaggggtattggtatcctgacggaaacaggaacagcctgacttatatcaaaattcaaagagatacgctttattggtatgaatttaatccggaacagggagatgtgcaggtgggggaagcagatggtattgtattcaaactcggcagcaagcgtcggttgaaaagcgggaaaacattgacgtacacagatacttctaaattgaattttgaggagtgcaagatatgctttgaggatgatgcgatggagtattactggcgggaaagataaaaaattttataaaagggaagcagaagaaaggagaaatgctggttatggcagaacaaaaatagtgatgcaaattatcaaaagtaatgtgaggaggaaagtgtgatgaaaaaatggaaaaagtatggggcctttatgtttgcaatggtgatgtgtctgagttttgctgcctgcggaagttctgacagtatagcggcatcatcggaggaaacggaaaatgcagagggcgacagtgaggaattggtgacagacgcagcgtccctcgatggtatgtggagcattaatggcggcacaaagctgtattttgacagtgagggcggatattatatctatcgttcctattatggggtcggcggacgcggtgaaatgtcggagtccccggaagatggcaagccgatgatgacattcaatggtttcatgtatgattttgtcttgcgtagtgacggtgtgctgatgccgaatcagaatgatgacggtgatggacttaacattcaccgcaatactttcaaacgggatgatacggcaaaacttgcagaatgggaggcaaataactgggacggcatgtggcagaatgcagtgggtgaaaccattgttattgacacggcgaacatgatatatacagcttcttcaccggattattccatggacggaacccttggtgacgagggtgagggaatggggctttatctttacgacaatgaagaccgtgcttatctctgtgcaagtgaagacggcaacagttttactttgtccggtcagtatcctggccgatacagcgatgatggacattttgacggtgtcttctacagagacggtgacattgcggcttatacagaccttgaaaaagcaaaattctactatggcaatggttctgatacatggctgtggtacaatgacggcgtaaatgagtactttttgggggatgagtataagattggcgatgatggacttgcctattatgaagcggataataaggtctatcctggaggatggattcctgatgaaccctatgacccttccgtagattggggtgaaaatgcgcaggaagaaactagcattaatttagaaaatgatttcagccattttgagggtatctggtattatgacggtgacctttcagcggaaacgtatatcgttatggatgcttccggaaactggagttattatcagcgtgcgccaggtgctgagccggcggagatggattgtggtacattgacacaggatgcagatgcagcgaatatttattatgcagagtctacgatgtatgatggtgtgtcacatcaggtctttgcaggggacggagatgtttttctttgggatgaagaaggaaattactatctgatggaatagggaagttgagaaaataataaagaatagatggtggggctgagaaaggagataagtgcatgacgtttggtatggcagcagtactgttgattctgattattgcgggaattattttggcagtgcggggactgcagcagagaaaaatcctttgtataattatcattgtactgctgtctgtgtttgggttggccctggcagtttacatgggactgacgatgctttttgtggatgcggtgcggagccagtcgcctgtgtaacagtgcagaacaatagaagttgcaaatacaggaagccttcctggaacttgtaccagtgataaggcctttaacaaagaaacggaataatccgggttattttatcaggcgtgatgatatgaatacccggatttttcattgcataggaaaatacgtcctatgcaatgaaaaatactccgccaggaggcgcagttcgtggagaggaatatatagctgcgctatccactcatgcgcaaaagtgtgcgtcaagcgcacactttattctaagtttttgaggaaatatgaacttgatgacagataataagcattgagtatttaattgcaaaaatagatcgatataggaatacgtcgataacctgaaaatgttatgataaatgcagatgaaaaacaatgctgaaataatgagaggggttgtgtttgatgaaaaagaatggaataatgttacttgtagcgctactggtgctgacactgtttaccggatgcgaaggaaagagtctgcatccaaaggcagagagtgggtctcagacagagggtgaacagcagattcaggctgaaatgcagagtgaatccggaaatcaggtagagagtgaatatccgacagagactaaagagcagttggatgaagaagaacaggaaaagcatgaagtaaaagcaaaggttgagaaagctatcggggaatcctttgatgatgatgcttggagatatgtggatgcttcagaaagccatgagggctatctgaatagagggcttggtggatatttagtggaatgttatagggatggggataaaatttatgtgctgtataatccggattcaggtatgcaccagtatgataatgatgtgtgctattcaacagatggcggtatgaactggaattatacgcatttgcatggattggctggtacagctatgtattttgtgaatgatacaatcatcatggcagatggctatgtatatgatgtgccttgcaacggtgtacaaagggaacataataaaaaacttaataatggactgccaatcttacacaaagtaccgcccaaacgagactacgggcggtatttttgtatcatggcggagaaaggaggaacttcccacgggggcttgactgaaaagttgagccccttttttcatgccaaaaaacaggaggtaaatgcttatggcagatgataaaaccacaaaaacgccggaacagccagtaacggataccggatcgggcaaagaaacaccgcctactcccccaaaagagccggagaaggtttccgtttccccggaaccggaaaaaaagacggagccagaggtaaagaacccacaggtttctgtctataacttcgctgagattatgaaggaaaagaaagccgaggaacgggcggcagctcccggcggggaaaagcctgacccggcaaaagcggagaaaccggaaaagcagccggaggttccgaaaaaagcggaggaaaaacccaaagagccggaacagccgaagcgccggggccgtcccccgaaagcagataaggacaaggccgccgctccgaagcccaaagctcctgcacagaaaccgggaaatgcggtcaaaaaggaaccggagaaaaaagcagctccaccggtacaggccgctcccgctccaaaggaacccgataagccgaaggatgctccacgccgggacaaggagcagatcgtctatatcaagctgaacgaactccacgccttcaaaaaccatccctttgaagtccgggacgatgaagaaatgcgggctatggtatccagcgtcaaggacaagggagttacccagcccgctattgtccgtccccgtgaggatggcggctatgaaatcgtatccggccaccgccgccaaaaagccagcgagcttgccgggtatgcagatatgccctgtatcgtccgaaacctgacggatgatgaagccatcacgcagatggtagaggacaatctgaaccagcgtgaagaaatcctccccagtgagcgagccaaagccttaaaaatgcagcttgaggccatcaagcaccagggctcccgcacttcgggccagattgacccgaaggacgcaggcaaacgctccaacgaaattgtggccgagcgcaataagatggcggtcaagcaggtgcagcggtatatccgtctcaatgagctggttcccgacctgatgaagctgatggatgaaaaaaagctgggctttactacggcggtggagctttcctatgtcagcaaaaagaaccagaactatatcgccgtcactattgacagccagcagtcctcgccttcacaggcgcaggcaaagcgtatgcgtgagctggacgaaaagaagctgctcaacggggatgtgatcgacggcattatgatggaggacaaaaaggaggtagacaaagtgattttgacaggtgcggaactgagcaagtatttcggcaaggaaactacgccgagggaaatgaaggaccagatcatcaagctgctggacgactggaagggtcagcagaaggaacacgaaaagccggagaagaaaaccgaacaggaaaagtaagcccaaacttcgggtcagcatggcccgaggattgcggggctctgccccgcgccccgaagctctggagatataaatgattccccgtcgccagttattccgtagcatagccgggaaaatcagtcaagggcagcgccgccgcaggcggtgccagaggcacccttgacggatttctcccggttatgctttttcccggtcaagcgacggggatataaattctccagagccgttccccttcccgggggaaggggcggaggggttgggcgaactcttgcttttccctaaaccaaaacagaaatggaggctcaaccaatgaaacgacctttagcgtacctgaccgccgcatggagcggcgagccggatgttgatatggaactggcggcccactactgccgtcttgcttatgaggcgggcttttccccgatatgcccgctcttgtatctgccgctgtttttgaatgacagcgttcccgaggaacacaaggccgggattgatatgcgccgggatatgctgcggcgctcccacaccctgatcgtctgcggcagcgttgtggacgaggatgtgaaaaacgatattgcagttgccggacggctgggcattgcggcgaccacgctggaaggggtgcttgccgtgaagggacacggcaccccgggccatgccggacattaagctggggagcctttttgacgggatcggcgtgttccctctggctgcttcccggtgcggtatccgtccggtatgggccagcgagattgagaaagcgcccatctccataaccaaaaggcactttcccgatatggcgcatttgggagacattacaaaggtggacggcgggaaaatcccgccggtccatgtgataaccttcggctctccctgtcagaacctttctctgatcggcaaccgctcaggccttgccggggcaaaatcaagcctgttctatcaggcgtttcgtatcatacaggaaatgagggatgctactgataacctatatccagctatcgctgtttgggaaaacgtcatgggagcgttttctacaaatgaccggatggactttagagccgtcctatccgccttctcggacaccgaagttccaatgcctccttcgggaagatggggaaacgccggaatggtgcgagggggaacgcctgatgtgtgctggcggctcatggacgcccagtattgggcaggctcccgaaggctggcacgaaggcagcggattttcgtcgtggcggattttggaggcagacgtgccacagacatactatttaagccccgtccaatgctcccacttcctccgccttgcggagagggcgggcggaccgccgccgaaggagatcgaacagcttcttttgaaacagggcggcagataccagtcatccacccctttcagtgcttccgtatgcggggagcggcaaaaaggcaggaagaaacggccttccgaaacagcttcggattaccaactgacccttttcccactcttttagccagtgatgtaacgccctttgccttctggtatgagggcgacccgaagggcggctgtatccgttttctgacggaaacagaaagtgaacggctgatggggctgccggagggctggacaaagtacggggcggacggcgtggagattcggtctctgcaacgctacaaggcgctggggaacgcgattgccctcccttgcgccgattacattatggccgggatctatgaggtgctggctgaccgggccggaaaggaggaatgagcccatgtttgaagcctatataaccaatacagccctataccccttaatggggattgaggtagggacaacggtacatttccccatgacgacacaggagttgcaggccgcccttgccaaaatcgggatagacgggaaacggtacagcgaagtgttctttaccagctttgacagcgatgtgctggggctctacgatcatctctacgaatgtgagaacatcgacgagctgaataagctgggccacgctctgctggaagtacgggataagggcggactggaaacctttgaagccgctcttgtcttgggaaaccacacaaggagcgtgaaagatttgataaacctgacgcagaaccttgacctgtaccgcttttacccggatatttccgatgatgaagggctgggccgtctttacgccgacgagctggggaccatcgagataccggagcacattcagaactacttcgattatgaagcatacgggcgggatgtgcgtatcaacgagggcggcgtattcgctcccggtgggtatgtgtcggcagtcccggagggcttcaaggagtattaccacgggtcgcaggacattccgccggaacaccggatatttacctatcctgaaaaggccgagcctgtccactccattctcgctgcactcaaacggtttcaagaagccccgcccgctccgaaaaaggacaaggcggggccttcccatgaagaacggtaagacttcgggccaacatggcccgaagcatgaaggaggtgcataccatcaactattaccctatcaatgaaggagccgcccgccgggcaaaagaaatgaacagcttttccgactacaaggaagggagcgcaacggcggaataccgggcaatggtggacaaggccgccgccatagcggaaaagcagaaatcccgggtggaccccatgtaccatgagaagatcgaccatctgttagacacctacgcccgcaagctggccgaaaacatgaaccaaggctttgccattgacgcaagggttccctctgtgctgatcgccgggccttccaatttcccggtgggaaagaaggaaaaacagaaccgggcgcgggacagcaacattgaggaatggcggcatattcaagggctgctggataagatacgcagcaccggcatgggcgggatcagcgccgatgacccggcagcgattgaaaagctccagaagaagctggacgggctggaacgctcccagctcattatgaaggaggtcaacgcctattaccgcaagcatggcaagctggacggctgtgcgctgctgtcgccggaccagattgaaaagctgaaagcaagcatggcgtcaaattggcgaagcgacccgaggccctttgaaagttaccagctaaccaacaacaatgcggagatccgccgggtaaaggcccgtatcgaacagctttccaaacaggcacagcaggaattttccggctgggagttcgatggggggcgcgtggaaatgaaccgggaggacaaccgcttgcaggtgttctttgacggaaagcctgacgcggacacccgggccgagctgaaaagcagcggctttcgttgggctcccagcgtgggcgcatggcagaggcagctcacggacaacgccatccgggcggctgaccgtctggaatgtatcaagccgctgtccggcgaaaagccctcccagcttcaaaagaagccctctatcttgcagaccatgcgggaacagggcaaaaaagtccagacggagccggaaaagaaagcaccgtccggcagggatgccgagcggtaagcctcgggccacattggcccggggttttctgttccccgagattgtacgggggcctcccggatagcgggaaccccgacggaaaggaggttttatgcaggaagaagtaaaccaaaaaacggttgccctttcgatcaggacaacgaagctcacgggaaaagtgctggctgccgctcttggaaaggtggcgcgggcggtgcaaaagcaccaccggaaggcgctgaccccgcagggacgccagagcgtaaaaaagctgatgaaccactatggcggcaaaagcgctatgccctatgtgggagccccaaaggattttgaccggattgcgaaggagttccatgtggactacgctttccataaagtgagccccggtcattacctgctgtttttcaaagccaatcaggcggacgttatcacagcggccttccagaagtacagcgcaaaggtgctgaacaaagagcaggacaaggcttccatcctcggccagcttcggaaattcacggagcagatcaggacacaggcaaaggaaaagcagcgaaccagagaggcggtgaaggacggacgttgagtgacaagatcagaaaatatgtgctcccaaacctgccgtacctctttgtgttctggttcttctccaaaatcgggacggcctaccggatcgcccccggcacagacttcgggacaaagctcgtggggatgcttgataccttccccaaagcctttgaaacctactggccggggctgggcggtattgacctgctggtgggccttgccggtgcggctggggtgtatctgctgatacagtcaaagatcaggcaggcgaaaaaattccggcgggatgcggagtacggcaccgcccgctttggaacaaaggaggatataaagccgtttgttgaccctaaatttcagaacaatgtcattctgaccgggacggagttccttaccatgaacacccgcccgaagattcccgccaatgcccggaacctaaacgcctgtgtcatcggctcgtccggctcgggaaagacaaggttctggctgaccccgcagctccttcaagcccattcctcgtatgtggtggtagacccgaagggcggcaccctcgaccagtgcgggcggtttctgcaacgggagaaatacagggtgcgggtgttcaacagtatcgacttttcaaaatccatgcactacaatccgctggcctatatcaagacggagagcgatgttttgaaattcgttaccgccctgatcgctaacaccaaaggcgatggcaaggagggcgacgagttctggaccagtgcgactcgttcgcagacggtaaaaagtctgcgcacgagcaacggttttccgttgttcggagaactggtagtttgataggtggaatgacggggtaacgccctgaaacgcctacccttgatgggcgtgcattagctgtaatgactggtgtacgaagccccatgacaaaggctgagagtaaccgtaaccactgcctaaagtggtcgaaagcggtctggaggcagactgtgttacctataagccgagagtctataagatatatctgggagtgacagggcagaaatctgcctcaggaagcaacgtggaacaggcctccggaggaacaaggtggcaggtgattccggatggaaagggaagctattatctcgtgccggaatgctcaggaacagctgcaatggacctgacgaacggcaccgtggccaacggaacgaatatccggatctggaattataatctgactgaaggacagcgttggagccttgttaaataattaaaaatgattgattggaaaagtcaaaaagatattttgagataagcaataacagaaagcgagcgacagagatgagtgatacatactataaaccactgaaaattgcagagaatatttaccatatctatgaaccgggcaatgttaatacaacactgattataggcgaggagaaggcattgctgattgatacgggttatggatttggtgatctggcagcatttgtgagaacgctgacagacaaacctctggaagtggtgctgacacatggacatacagatcattgcggcggcaattatgaatttccgacggtttatatgaatctgatggatgtaccgacttatctctggtatgaagcaacgcagaagacattgattgttgaaaagtttaagagggaccggtctgcggccggtctccctcctgtgtggccggatgattttgatgagaaggcctgggagcagcagcatacaagacattttgaatcgctgaagaatggacagatctttgatctgggcggacgagaagaagaaattatttttatgccgggacatacaaagggctctattgttgtatttgaccatgaaacgggacttttgttttcaggggacaatatcagcgacagtttgtggatactgtttgatacaagtgcaccgttggcggaatatgtagggcatctgatggatatcaaattacttccgttgacgggaattgtggcctctcacagagatattattttcccggtaactatcatcaatgatctgttgaggaccatcagctgcattaatccgcagacggatcggggctttgttcatccgagaacaggacagaaggcattgaagcatcgtgagccatgtgaagccattgaaaatattcaatatatctatgtcgtttatgatgagaataagcttcaataaaatgccggtttacgcttgactaactgtgtacccgcgtactatagtatagataatctctttgcactgcatatatacagtacaaactgatcaggcggggcgcactttttataagcgatcgcggccgggccctttcgggcagcagatgaatgaaatggtgaagcatctgcgggacagttggtgttccgcaggtgctttttatgtttataagcatctgctgcagaatatggagagagcgagtattagaatcgtttcatttcagaacggagggtgttattgatgaagaatgtaaaagcaaagacaaatgaacaaattgcgatgcaggtatcagcgaatagtattgctgtgaacctgatgttatctatttttaagctgattgccggcttgatggcatcatcaggagcgatgatctcagatgccattcactcagcatctgacgtgttcagcacaattattgttattatcggagttaagatttctggtaaggcatcggatgaagatcatccatatggacatgacagatttgaatgtgttgcttctattatattggctattcttttaggtgtgaccggtgtcggcatcggtttaaccggtgttcagaaactgacggctggtcattacgacacactggcagtacctggagtgctggcactggcggcagccgttatttctatcgttgtcaaggaaatcatgtattggtatacaagaaatgcagccaagaagattaactcaggggcattaatggcagatgcatggcatcatcgctccgatgcattatcatcagtcggaagtttcgtaggtatctttggagccagaatgggattcccgatgctggatcctctggccagtgttgtcatttgtctgtttgttgtcaaggcagctgtcgatattttcagagatgccatcagcaagatgacggataaatcatgcgatcaggaaaccgtgaatgaaatgcatgactgcattatgaatattcagggtgtagaaggcattgaccttctgaagacaagaagtttcgggtcaaagtattatgtagatattgagatcaaagcggatggtgataaaaaattgtgggaggcacatgccattgctgagaatgtccatcatgccatagagcagcagttcccattggtcaaacattgcatggttcacgtcaacccggcataaatcggattactgttatagcagggattataaaaactgatatggaatttctcatttattttttgtaggaataagaaaatttaatagcgtgcggttaagtaatcttgaaaaggacctcaaagggacttattcaaacacaggagcttcaacgccggccggtacttagacagtgtttttactgccttatgtaccgctgccaggtgttggcagcgaaagcggcctgtgctgaataagtccctttgaggtcctttattgtctattggtccgcacgctcaacttttcgtatttttttcatgaattttacataaccctggttttagattttacatggaagttttatctttaatagcggcacgagaagtcaaagagttaaaaaggaaaatctcaaagaaggagaaatgagaaatgaaaaaatttatttgtacagcattaacacttgcaatggttgtaggaagccttgcaggatgcggaagttcatcatctaaagaaacaacagcagcaagcggtgccgctacggaagctgcgacagaagcagcacagacagaagctgctgcagcaacaggtgattttgatacaagcaaagaaatcagtgttaactcacgtgaagatggttcaggtacaagaggtgctttcatagaattgtttggtgtagaagagaaagccgctgatggtacaaaggttgataatacaacagtggaagcaaatattacaaacagcacatctgttatgatgacaagcgtagctggtgatccatatgcaatcggttatatttcacttggttcgttaaacgatacagtaaaggctgttaagattgacggcgccgaggcaacaacagataatgttgcaaatggcacatataaagtagcaagaccgtttaatattgtaacaaaagacggactcagtgatgtggcaaaggattttgtagattatattatgagtgctgaaggtcaggatatcattgaacagaacggttacatcaagattgatcagaatgcagcagcttatgcaggcagtaagcctgaaggtaaaatcgttgtcgcaggttcctcaagtgtatctccggttatggaaaaattaaaagaagcttatcttgcagtgaacacaaatgcagatattgaaatccagacatccgattccacaacaggtgttacatctacacaggaaggtatctgtgatatcggtatggcttccagagatctgaaagatacagaaacaggtgtaacagcaacaacaattgcacaggatggtatcgcagttattgtcaacaatgaaaaccctgtagagaacttgacaagtgaccaggtaaaatctatcttcacaggtgaaacaacagtctgggcagatgttcagtaagcagtattcgagtcaatgaattgggggctgtctccggacagtccccatgttttaggatgcaggagtatttatgaaagttaaagaaaaagtaatggaaatcgtttttctggtggcggcctgtgtttctattctggcagttttactgatctgtgttttcctcttctccagtggtattccggccattggtaagattggaccgctgaatttccttggaggaactgtctggaaaccaagcaataacttatttggtattttaccgatgattctcggcagtatttatgttacagcaggggccatcatcattggtgttccaattggtatatttatggctgttttcatggcaaggttttgcccgggcagcctgtataaaattttgaagccggcagtagaacttctggcgggtatcccatcgattgtttatggtttctttggtatggaagttttggtgccactgctccgaaatacatttgcggcatttaactgcaaaggtaattctatgctggcagcatccattctgttaggcattatgatacttcccaccattatcggtgtttctgaatccgcgattcgtgcagtgccgaacagttattatgaaggatctctggcattgggagcagatcatgaaagaagtgtattctttgcggtgcttccggctgctaaatccggcattctggctggcgttgtccttggtattggacgtgcgattggtgaaacaatggcggttatcatggtagcaggtaatcagccggcgatggcgcacagtatatttaagggtgtacgaaccatgacagccaatgttgtcattgaaatggggtatgcaacaggtattcacagagaagcattgattgcgacaggtgttgtattatttgtatttattcttctgatcaatctgttgttctcagttattaaaaggagggagaaataatgagtgaagtagacggcgttaaagcaattaataaagtcacttttggacagcgcttgaaagcttataaaagaagcaaattatctttccttctggcagtacttgttttactttcagcgattattacgattggcgtgctgggttacctgatattttatattttgattaagggcgtcccaaatctcagtccagacctgttctcattgacttacacatcagaaaatgtgtccatgattccggcaatcattaatacgctgattatgacgattctggctcttctgatcgcagtaccgcttggtattttctcagctatttatatggttgaatatgctaaaaaaggaaataagctggtaggtgttgtcagtgtgacaacggaaacactggcaggtattccttctattgtctatggccttttcggtatgctgtttttcgttacctattgccattggaaatattctatactggccggtgcatttactctctccatcatgattctgccttctattatgcgtacgacgcaggaagcccttttgtcagtgccggattcattccgtgaaggcagttatggactgggagccggtaaattgagaaccgtttttagaattgttctgccgtcagcaattccgggtatactggcaggtattattctggctattggtcgtattgtaggtgagacagcagctttaatctttacagccggaactgtaccggatattgcaaaaaacctgatgtcatcaggacgaacactggcggttcatatgtatgtgttatccggtgaaggactgcatacggatcaggcttatgcaacggcggttgtgctgctggtcgttgttatcattatcaatggattatctacactgatcgccaagaaatttacgaaggcctagaagaaagagaaaggaatagatatggataaatttaatgtagaacatcttgatttatattatggtgatttcaaggcgctcaaggatatcaacctgaagcttccggccaacgagatcaccgcatttatcggaccgtccggctgcggtaaatcaacatttttaaaatcactgaatcgtatgaatgatctggtggagggatgcaagattaccggtaaagtgacgttggacggtgaggacatttacggatcgaatatggacgtcaatgtgctgagaaaaaaagtaggtatggtttttcagaaaccgaatccttttccgatgagtgtttatgacaatattacatatggaccgagaactcatggtatccacaaaaaatcccaattggacgaaattgtagaacgctcactgagaggagccgcaatttgggatgaattaaaggacagattaaataagagtgcccttggactttccggtggtcagcagcagagactttgtattgcaagagcactggctgtgcagccggatgtcatcctgatggatgaaccaacgtctgctttggacccaatctcaacttccaagattgaagatctggttttggaattgaaaaaagattataccatcatcatggtcactcataatatgcagcaggcgacccgtgtttcagacagaaccgtctttttcctgttgggtgaagtgattgaagacggcaaaacagaagaactcttctctatgccgagagataagagaacagaagattatatcacagggaggtttggctaatgcgcaatcgtttcgatttacagttaaagcagcttaatgacgacattattgagatgggcaatatgattgagagagccatcgaaatgggtgtttatgccctgattggtcacgatacggataaagcaaagcagaccattgattatgatatggatattgatcacatggaacgcgatattgaagcactgtgtatgaaacttctgcttcagcagcagccggtggcaagagatctgagacagatttcctcagcattgaagatgatcacagatatggagcgaatcggggatcaggcctcggatattgcggagttatcgctgcagctgggagatgtatctgatattgatgaaatatcactgattcagaaaatggccaatgagacaatgatgatggttgtccgtggtacagaggcatatgtaacaaaagacctggatgtagcccacaatgttattgataatgatgatgtggtagatgatctctttgatcagattaaaatggcactggttaagcgtatccaggataatcatgtgaagagttttgaggcggcggatctgttgatggtggctaaatactttgaacgtatcggtgatcatgccaccaatattgctgaatgggtgatttattctattacaggcaagcatgtagatgaggcagataattaagctgtgcaatgagattgcaggagagataaaagaaaggcgggagagaatgatgatgaagcgtatgtggtatgaactgaatattctggcactgagaaaacatgtgcgtcctgtcagcttgttcctgctggtgcatacactgctctggtgtgatctgacatggctgatttgtcagattggatgcgatatcctggagataccaaaggcattatatcagatgaatatccttctgatcacagcctatgcaggtgtctttggcggactgattggcggaatgatctatctgatgcatgaaaatctgacctgaatacaggaagaatgtctgtaaacagaaacgaattccgtattaggatatgcgagcgagtcttgaaatcataagaaacacgcttcgcgagtttcttatgattatcgcgacagtcgccaaggcctcatgcaagcatgggctttggctcattgctcgcgtaaataaaagtgacccgtatgctgtggaaatcacagtatacgggtcattttcagattgtttgtaaaacacggaaatctgcggagcctgccataaaccggcctatgatcattcattatatccgtccggcagaatgtacagagaatcaatggaatgttgtatgtaagtggcaggaataaaagcattcctggttcccgtgatattctgcacacagccgacagcatctgccgtatcgcagacaggtaccgtagatttaagcgttagtatgattataacattttgcatagtaaatagcaacgattaaaatcatgaagaattatgaaaaatagccatatatctgtgaaaataggttgcatttagatggagcaactggtaagctagaataggaaatgataatgacagatatagagacaacaaaggagtagaggaaaatgaaaaagtttatatctgcaatatgtgtcatagcgttgatgatgccgtcgacattatcagcttttgcagatgcgggaacagcggacaatctgagcggacagcaggctgttgtggtagatgtcgctgacagtacggaggatgccgcagaaacggggacagaaacagttgttgagacagaaagtgcttctgttgtatcaacagagaaggcttccgacacaaaagcgacgtcagatacatcaaaggcatctgagacagagactatggatgagacggaggatgaaccggaagtagacccacagtatgcagatgatccgcagtattggaaggaaatgaagaaacagtatggtgttgcaacaatgagtgcagtaccgagtggctatattcatgactctcgatttaataaaggatataaaattcattatggtgtagatgtttccagctatcagtcaaatatcgattgggcaaaagcaaaagcagatggcgtagaatttgcgattatccgtgccggttacagaggatggggaacaggccgcattgttgcagatgaagatattatcaagaatatcaaaggtgcaaaagctcaaggtataaaagttggtgtatatattttttcacaggcaattacagaaaaagaggcaagagaagaagtagataaaacaattgagtttattggcggacagcaaattgatttgcctatggtgttggattatgaatatgcagaaagttataatcagttgactggacgactttataaagcaaatctgtcgcgacaggcagcaacggatgtatgccttgctttctgtgaatatgcaagccagaaaggctatgaaccgatggtttatgccaataaagatatgttgacgaacaagctggatgcagatgcaatcagcagtaaatacagtatttggctggcaaattatacaacacaaacttcttattctggagactatgatttttggcagtattctatagttccggttgatggcatttcagactcaacagatggagacttctggtatgagaaggtgacaaatgatatatcgataagaaatagtaacaaacctgggaatataaatcagggagcaagtttttcaatcagagggcagttattatctacagctgagatgtcttccgtaacggtcggagtatatgatattgatggaaaacaggtgattggaaaaacggtgaatccaaatagtaaagagtatgatattgcggatattgacagctcgattgagttttctaaacttccagtgggagcttatcgatataaaataatggcaacggctggacagacaaaaacgcttgtcaatagcgcatttatggtactgagtaatggaagaacggtagcagacggaacatactatatagaaagtatgaagaacaacggatatggactgaatgtaagcgggaacagcagtgcctctggagccaatgtagtccttggagcgaagagcagttcaaactacatgaagtatgtattcagttaccagagcaacggctactataagatcaaaaatgctgcgtcgggccagtatctgggggtaacaggtcagaaatcagcatcaggaagcaatgtggagcaggcctccggagggacaaggtggcaggtgatcccggatggaaagggaagctattatcttgtgccggaatgctctggaacagccgcattggatctggcgaatggtactgtagccaacggaacgaatatccggatctggaattataatctgactgaaggacagcgatggaagctggagagcacgacaacaagttttctagtttctttactttctgactcttattgatgttcttatacttaacggcatcagagcagacagctaagtctttaattcctaagtctatgccaactccatcatcattaagcgtttccttgcagtcaggaaattctacacatacactgatccaccagttcaatccatcaaaggatattctcggattcatatagtttccttgcagtcaggaaattctacacatacactgatccaccagttcaatccatcaaaggatattctcggattcatatatttaacatctgttggaatacgtccatgttctgcaagtcttacccaattctttttttgcttatttgctttcctgctggaagaaaatccttcaagcttaacgtgggtattactgaattgtatcttaacgttgtcctgatagaacttcggcattgatctctttctggacttgaatcttgggaatttttgcaaacccttgaaaaagttcttatacgcagtacaggcatctttgattgcctgtttggttacattatttgaaatatttaataaccatgcgtattcatcagaatgtctaagctttgtaaattcttttctgagttctgttttcgggtatgttctcttcgctccgctctgagaacgaccttcgaactaaactcagtctccactgcgttccgccttcgttaaggtctctggtcaagccctcgaccgattagtaacagtcagctccggacattactgcccttccacccctgccctatctacctcgtcgtgtaattgcacctgccaaagcaaacatcataggctctgtacagcccaaagctggggaagcttccttgtccaacagttctctaaaaattgtcttactcatactcatttccttcctttcttttctttcgcgttttttgattgaatttattattgttgatatatctcataattcatgcgatatatatctaactaaatctgtattgtttctagttgaggatattcctttgtcaaaaattccctgtttttacatagttcttaatctgttccacgctcttcccacaaatgcctaaaacctctgcagagcgaccgtttacaaaccaatttgtatcatgagccacaccaaccaatgtaataacagcgtccataataggagtttcaattcctaacaaatcagcgatggaggcccagcaaaccaatgcaatgggaatatcttctgtaagataacgataatggatgtcattaggaccggcaatggatgtcagcgcatggcaaccatgacccatagcatacagagcctcccatgattcgattttttcaacaccagcaaaatcctccaaagcatgaatctgatagcccagagctttcccaatagccaggcgttcttcattcaaaagcacgtcaatctttaagccagagggctgaaaaccatgttcatataggaagaaggtaaaatctggcttttcaatgttactcaggttcaccagacacggtccgggatgcactgtggggttaattaagctcaatccgcattccagaatatccgcatacatacctggaaattcatagatgtcttttcttacctgatcatagtatttttctccggcagaagcaggaaaaaatgcaatgggtgccaagtgccgctcaaacatacggaccttgccaggctcaactcgccttgcgctaaagggtgggatagtagattctgcaaaaatggggcaggacgcatcctcttcccatacatttttgtaaatcagggaaaccatgcaaccattgaacgtaatcagaatctgctgtgcagtggtatgtcccttcagaattctcgcatattcttcgtggcgattgccgggaacacacagaatgatataatctgcaccttttaccgctttgtcaatatcggaagtaacgacatcaattttttcttttgcttcaaatacaccgacacattcaatttcgtgtgtgtctacgattttttggattctggaaatcaggtagtctggcgcaaataaacgcacctcatgcccattggacttcaagtcaaccgcaacagtttgcgcaatattaccagtaccaagaacagctatttttttcatttttttaccatttcctttcttttattttattacttaatacactttccttatacactttccttgaataagccctcttttttgtcgcgagatttgattatgaaatagcgaacaatgcatacaaccgcaacaacacagccagaataaccgcaataggtcataatatagttcaacagggtttcatagggtacaaacagtgtgatgatatatacacatatcccggcaatcacacaaattagcttatattttttactcttatcatctttagccagcatagacgcacaagtccacaacatcgggcagatggtagaaaaaattgctgccagaatgatgattgcaaacaacagagataaaatgattccagcatttccaccgaaaacgctgtttgccagcagcagattagggatggaggcctgtacagctgcctgaatgtttccgatatggttaagacccatcagaaaggaaaccaacatgatgccaccggagctgataatcataatgagctgattatatatgaatttatattctcttaaattgtagccaattgtaccaacaaatgcggaaactagtaacagattgcagcctccaaatgacaaacccgctgtaacccagttggaaccagcatgaatcacatccacatcgccactattgatagctgcatttccttccacaatcatcggatagtatttaaaggcagctacaataccgataaacagcgtgaataatacaataatcggtccaaccttgccaataatatctataatcttgtttaaacccatgacagcaattgtaaccgaaagcactacaccgatggcggagccaattggaatggaaattccccattgctggtgaaatacattgccaaatccggaaatcataaacatataacagcaagcgttaaacagccatgcaaaaacctggaataattttccaaatacattaccggcatagaaatcataaattcccgctaaatctttcagtccgcgcgtacgacctgcataagaatatgcaatataagccaagcaagaaagcagcagtgcgataacagcaacacctagactagtccaaacagaaccccagccagaaaaatactgcatcgtttcctgtccgctggcaaatccagaacctatcagatatgcaaacattgcaccgattagattgagcatcaatccaagtcctatttttttatttcccacttttcatattcctcctcctattttctttgaacgcttgattttttctaggcttccccaatacgttcgttaaattttttcctttatattgctttgcaaatccgttataacgtacttcaaatataatctattttttaaaattggtcaatatcctaataatgcacaaatatcatagcgaatttttattcactataacgttttttcggagtgaaatgtcaaaattagacacaaatttgctctgctcacttgacaagaaggcggaagtgtcgtaaattacatttcataggcggtcaatttagcgaacgcactaattgaggaaaaggatgataaaatatggaaagctacttggaattaggagaacggttaaaagaaatcagaggcaatatggggcttagcctagaacaggtgtctgcattaacgggcgtaagcaaaaccatgcttagccaaatcgaatcctcaaaatctattccaaccatagctactgttttcaaaattgccaatggactaaaaatcaaagtggattctttgttgtgcggggaaaaaaagcaatattatgatgtcattaacatcaataacctgtcccctgcgattgataatcatgaacaagtttatatgtactgtatttttccgttttctccaacaacgggattcgagatttattattgtatttataaatcaggatgtgaccacgaatcggtaacccataaaaacgcaaaaatggaatacattacagtttttcaaggcgaactggagatggttgttgaaaatcgttcctatatagtgaaaagcggagaggccattaagtttgatgcaacattgcatcataaatatatcaataaaggtgaaacggatgttattgcgcaggtcattttaagttattaaagagtctatgatataatagacaacattgggagaatcttgtattctgaaaaaacggaagaaaacagtacgcagaataacaatgacagatggcaaaagaaatatatctgtcagcttctcggagagtatgatattgagacgatggaagatatttaggacgctctaaaagatcttctaggtggcactatcaaggaaacaggacgagtgctgatgtgtccggtcgcgccgacaacttccttgtttgagtccacaaacaccatggcagctaaagctgtagctaaatccagcaatacatttggaaagtaagcgtaaaacacattctctcgtaaccaacaaatgccggtataggattataaaaatcctgtatcggcgtttttaattgctttattgattgtgatcattttatctttaactgctcaaaatgataacgcggttttcctatgctctttttgccatactctatttcaagatagtgattaaacatattttcctgctcatcagctaataacaataatgctataaattgctttttattctcattcacttctcagattttcatatctactactccgtcaaacttgaagttcataaacgcatttgcttcttaaacgcaaacattccctcattgccatcaccgacaaaatcgtccggtgtatccggcataggatgtttttcattaaaaaattctgtaatatgaaaaccgcagacattcacataaaaatgaatgttgcgcttatcaaagtacggcgtacaggtttcccatactttcgtgttcggatatattcgttccaattcaaaccatatcttcttaccaataccattgctctgaactccgttctttacaaaaagcaggtcaagatggttatgctgtgtactctcattgataataacaacagcaccgcccaccatttctccatcgacaacagctttatagacagcagaaccctctgcattcagcgactggtcaatgtccttttcaggcagaataacagcatctgtttttccgaaaacatcttcaaaacctttctgaaatgcttcctgcatatccgacttgtattgcgttaattcttttggttctatacaaactaattggaaggtcattttatatctatctcctcaaaaataccgattttcttaattctacatactggaatttgcttgactattctctaaatctgtcatatccccaccaattggggactaactctttgagtctgactgtttttttagtttcaatatcaagtagaatttcaatttctccgctattcttgtctaattgcatcatatactcacgacaagcaccgcaaggagaacccactcaaccatcaggcataactgctacgaccttatcaatccgactctctccattcgtaatcatattggcaatggcgtttctttctgcacacattccaagtgtacatgccgtatcgatgcatacaccaacataaatatttccttgttttgtaagaatagcagctgcaacaccgcctgcatctataaatggggaaatttttcgactgttttgcaccttaaccgctgcattatataatttgtcccacatattacttacctcattaaataccgattgaactaaatcgctgcgcgatggcctgcgaaggctgtggcgcagttttctctttaacttaaaaaaggcagtagataatgagtcctaaaagtagtattgttaaattaccacaaaataacaattgaacaggatcatcattaacactgccatgaatagaataacaccagaatctcgttttcacaagagggtatctttgatacgtgaacctccatgatggcagtaactcattaacgttactagtatcatggaggtttccattatatttatatatagaagcgatgggatactcaaatgtgccgtatctggtagcagataaacctataaaacaagctgttgttgaacttggaactatcgcctttcaaattagcatgatttttagcagcttttttcgggaaattagcaggaaaggtattttgattagcaagatggacttttgctaatcgcactttgctacctgtccgatttctctcgttaaataagaaacgccgaaagccttgattttacagggttttcggcggggtttttggcgttcccgaggtgactcgaacacccgacctaccgcttaggagcaaggcactcggtaccttgctcctggtttatcgctgttttatgaagttcttgaaaagccttgatttacggggattattagctatcgtgggcacctgattgtcagttcttatatgttcccggataggccccgtttcggcctgttttgtttgcaaaatgttggcatgagctaatttagttctcagtaccgaattgccaaacagtaaaaattgagtgcttataacgacgccaatagatttatcggctaccgattccgtactttctcggaattgataactctattaaattattgacctgttttataatctctacgcttatattatgctccaaaacacacacattgtgtactcctaattttggcaatggagttcttattcgtcaccggcttcaccgctttgctatttcgtgggactttatcagccggcactcagaaaaactgcttcagtggtcaaaactatcccccgtcccgtcagcttcacctggtattgctaagatacatccgtaaaatacgttttacggataatcagcggtcgtcaaatgaatccaagcaagcttgattcatttttctcgtcactataacatatatcatgccttaccatatcattcaacaatgtacataaaagaatttcgatttttaatggtcgccaacttggctaccattagccagagcatggttttatgcaaagaaaactgcaagtctgggcgagttggcgaagggatggacttatcttttcaaccttttgcaatctctacatttttacctgcaaaggcaatgccatatttcacaatttccttgattccacggtccttcatatctgtatcatagtgcttatcctcaatctgcttcagagcctcgtcagcggatgcagataaaccggcatcattctttgtcgctttgaattccatgataacacccggcaaagaatgtaccttaggctccaacacaagatcaaatcttccttctccggattccctgtttgatctaatgtaatatcttgaggacatacctgctgccagtcccagcatcatgccatggtaaaagccttctgctgctccatcaaaacaactgatgcaggtaatcatatattttcggaggaattcctgaagtttcttcccatcattcagatacagtgctttttcaagtccagccatgacattgccatctactgtccccttgagccaggataaaatctctgtattgtaaactctgcgaatctccttattcggcagcgccagctccataaatgtcccaaattctgtttcaactgcatcgcttacaggttttaaatatcctgcaagtaacaagaaactgaagatggtatcggttccatccgttatcctcggatagatgacatccatatttaacgatgcctgaacggtctgcccctgcaacagtgcaaaaaggttttctgcaatatccggtgtaagagatatcatgatctcccggataatctcattatcactagtattggtccaatatggtttcgcctggcagttattatagaaataattggcaacagaccagggattatagatttctgtacttccgaaacgatatccatcgtaccactcacgaagttcttccagttttgtctcctgtccgtagtatgctgccatggtattcacttcatccacggtaaatccaaagtatttgctgtatttctcatcaagtacagaatttacgattggattattaagtccactaaacaggttctcctttgacacacgcaagataccggtaagaacgccaaaagcaagagaagggttatctttaagaccaccggacataaaattacgcataaatgtaatcacttcattatagaaatttctggaatgtccctgttggatcggagtgtcatattcgtcaatgagaatgactatcttagactgatgatgtttttccagcatgcgtcccagattcaggagtgatctggtatattccacatcactcagctcatccgtctgcattctggacaaataatcctgttccaccggattaagtctgtcgcttgtaaaaagctcattgtgccgcataaattcatcacggatcacatttttaattgccgcataagtactggcccaatccgaaaactttgcatctttgaaagtgatggaaatcaccggaaatgcaccttgcatcttctgatatttttcaccacatgaccaaatctgtttatctttaaaataaatagatgtatcctctttcgttttttcaaaaaacgttttaagcatatcaagagcaagtgttttgccgaatcttcgtggtctggtaaacaaaatgaccggaacctgatcgtcaatcaaatcacggatcagaagagttttatctacataataactgttctttactacatccatgtaagatgtattgccgactgcgcaagaaaggatctctccatttcccgctttagatttttcagtgccaatgtaagcatatgcagtctcctccggaaccttccaattgcgaccttttctcaaagcaccttccagtttccctgcattgcataatcctactactcttctggttgataagcccatgatcccggcggcttcttttgttgaaatatatttaatatcggtcatacaatcgcccctttcggaaatatcataacatatatcggaaacttcagcaatgtatttccgttaaatttccgttattctccctctgcgtttctgagtgaatgtccggtttcttgcattcctctgcaattttctctaccaacttctttgtatttccgtgatgtacagatgcataaacaattactgacttcatttttttctcccgcctaacgatgccattccatcgtatattcttcttctgatgtattttcatctgtttccttattcacaattttgaatccacaatgctgataaaacactaccgctctcatatttttcttatacacattcagttgcatttgaatccacaatgctgataaaacactaccgctctcatatttttcttatacacattcagttgcaactgatcatataaattcataacggtgcgaagcagttctgttccgatcccttttgattgttccgtttcctttacaaagatcccggctatataagtatctgtcagaccaataaatcccagaatttcctcattttcttctgctacaaatactttcgcttcaggaatcagctttctgaccatatcataattctttttccaataatctgcttctataaaagaatggctctctatatttacatgaagccataagtccattatctcatccagatctcttgtttcaaatcttcgaatcattttcttgtaccatattttctttacaacccgtttctgtaaatctcattgatcacagcctgggcatgttccatttcttttttctggatgattgcatctctgtcacttaagattgcaagcatctcatccaccagatcctcgattcggggatcacttacccggtacaaatatccaagcatacgggtggcagtataatctgtgttcatatttttataggcaatttctgcacagaactctttgggatatcctctgtccagtaaaaccttgtataattcatcggttcgttccgatgccataagcaatcactcctgttattccaaaaaactcaaatcatgacaacccgtccaacgggtggtttgctctagggctataagcccttgctactaggccagcgcctcaagacgctggctttctcttttggctatgggaatcctgcttacacagcattcgcatagctccgttcaagccatattgctcttgactcgtcgctaccccttaaggggtattgttactacttggcatcaacccttaaaagggtcttcatattcttttacactcaatttatccattgctatatcatgcatttcctgctcttgaatatatttttttattgttgcctcattcaatcctaccgtactaacataatatccttctgccaagaaatgacgatttccaaatttatactttaaatttgcgtgtctatcaaatatcataagtgcactttttcctttcaaatatcccataaacgataatacgcttatctttggcggaatacttactaacatgtgaatatgatccggcattaaatgcccctcaataatttcaacacctttataactgcacaattattttatattatctcttatatccgctttgtattgattataaattgcttttcgtctatacttaggtgtgaagacgatatgatatttgcacatccatttcgtatgtgcgagtgaattttctttcttcgccataaattacctttcctttccacaatatagcctgaacaactttattgaaaatggaaaggtaatttttttgtataacaatcgactcttacccgcatagcgggtggtttattgtttcgcccatctccatttttcggaacaacgaaaaatggagatgggcgaaacatactaaagtccataaagaaaaaagcggttcatgacatagcattttctgctaatcattaccgctttgtatgcaaccgtcccctgcgggaatcgaacccacagctagcgcttaggaggcgcttgttttatccgttaaactaagaggacgaaccagtacatcccggtgtttcacacttagacgcctgtttaaatatcatactatttacaacctgaaaagtcaagtcttgacctgctattgaaagctgtctgtttattgaaactgtttattgaaagctgtcttagagtcggccgacggcactctgtgaccgcctttagtctttttgcagcacagccactttcatgctgcgtacatactctccgatcggccctgctgcctcccgtccgtacttctcacacagacgaacaatggcactgcccacaatagcaccatccgatacagctgccattttttcagcctgcgccggtgttgaaataccgaatccaacggcgcatgggatgtcggtgcgatcatagagatcaaatccagtcccgccgcttcacatccgatatccggctcacgccggatcccgaaactaaaaaatccccggcaatgtaaattaatacattgccagggacgattggaattcacttatatcgcggtgccaccctgcttcacaggatagaaaaatagaaaaatcctgcgcgcttgttaaagaagtactaacatacttccggcaattaacgcctgccccgcgtcatagaatacttgaacagctctgctgcctttcactatgccctcagtggtccatttgcctatctgcgttcggcccggctctcatcctcccggactctctgtgcgtgcacaatatatctgtcaaaaattttttataattttttatctttttatttcagcgcatccttcagctcttccttggatgtcacaccaaccatacgctgaacttcctgtccgtttttaaaaataatcagtgtcggaatgctgacaacacggaactgacgtgccagatccatctgctcatccacattgactttgccaatctgaacatccggcatttccgcttcaagttcatgaagaatcggtgccatcatctgacacggaccgcaccatacagcccagaaatctaccagtaccggcttgtcggattttgtaatctccgcctgaaaattttcttttgttaaatctataattgccataataaaacctcctgaaattaaatttcttccatatcatttacaagctcagtataacagagatacccacagaatgaaatatctgattttatgaagttgctttacttttgtccattcacccgctatactaatttatatagtactttattttaaacaaaaagtaactccttagaaaacattaaaggattgtgatcattttgaatcagacgaatgtctccaacgagcttgccgccgcaccggtgggaaagctcctttttaaactggccgttcccacggtcattgcccagctggtcaatctgctctacaacatcgtagacagaatttatatcggccatatgcccggaaccggcagttctgcgctgaccggcatcggactgtgttttccgattatttatcttatttctgctttttcagcattgatcggtcagggcggtgccccaagagccgccatctgcatggggcagaataagacaaccgaagccaacaggatcctgaataactgtttcgttgtcctgattattgaagccgttatcctgagtgtatttttctggatttttggtgaaccgctgctgtggctcttcggctgcagtgaacagacaattgtctatgcgctgccttatatgcagatttatgtttccggatcgatttttgtcatgctggctctgggcctgaatctttttattacgacacagggattcacacgtttcagcatgacctccgtcctgatcggtgcaggtgccaatattatcctggatccgatttttatctacggtctgcatatgggagtccgtggtgccgcccttgcaacaatcatttcacagggtttgtcctgcatctggattctgaggttcctcaccggcaaaaagacccggctgagattgaagaaatccgatatgcaccttgagaagcgcattgtcattccatgtctcggactcggactcggtccttttgttatgcaggctacggatgcacttttgaatattgcctttaattcctcactgcagcattatggcggtgatattgccgttggttgcatgaccatttccagcacgatccagcagatggtatggattcccgtgcagggcattggtcagggggctcagcccatcatcagctacaattacggtgccggcaacgccaaaagaatccgacagacgtttaaatgcatgcttgctgtttctatgacagcactgaccgttttctggctgtttgtccaactgtcgccaacaaccttcatccgcatattcagcaattctgaagaaattattgcgacagcaggttggacacttcgggtttacatggccgttttctgcatgttcagcatccagatgtctgtccagcagacatttacagcccttggaaaagcaaaggcatccctttttatcgcctgcctcaggaagattattctgctgattccgctgatttttatactgccgcatttctttgacaacaaagtgtttgctgtatttcttgcggaaccggtatcagacaccatttccattacagcatccatcattactttccgtattgtcttcaaaaaggcaatgcaaagtattagtaaatctgcatagcagaaatttttgtgtaagatacccattgtatattttgtcttttaatattataatcaactataatacatctattattgcattataatactgattcaggatagggaggtatacaaatgtattgcgattttgaagaatatgtcaagaaccgaaaaccggacaagttgtctctgaagaatcttgtcgacccatctcttgagaaaccgtacgacaaagatgaactagctctgctttcccacctggcagtaatatacagcgaatctattacacctgcttcggaagatgagaaccctgaagctgaagctgatgatgacgacgacgatgatgacttttagaatcttttaaaagaaaaagctgacgtactgcgaataacaacagtacgccagcttttttatacactcttggactcacctgagagtccctacacggaattcaggtccgattcacagacactgcttccatctgtttatacatagtccagatgcccctgaagccagatattgccgcggaaacggcgtcccactgcaggctcacccaatagatcttctgcattcatacacagatcgatcaacacatcattgcattcgatctgtatctgatacagcttctctcctgtcagctgattgtagacttcttctacactgagaatatcccccatcaccgaatactgatcacaggcaataccatacggcataaaataagactctacaatcgtcaaaacatcctctgacttgatacgctttgaaatagaggtatacatgtcaatatcctctaatgtgagattctccagtgcatcctgatcgccctgtctggccgctgcaatcataccattgcgtgattcattctcccgaagccgcttcaaacgctcagaatcatttctcacaacaggcaggatcaccttgccggaaatcgacaatgccgacaaccttacggatacagaagaaatctgacgactcttcgggttcatatctgcataatccatcagatgattcatatggaaaataagagataccccaagattcaccacatcacacatgccatcatattcttctctttcagaaatcttctcaacactgacatcatctgtgagcgaaatctgatgacctgtataatgcggaaaataatattcataactgaacataccatgctcatctacttcaccacgcaccgtgatgcctgcattggacacaaaatctcgacacttctctgcatagaccgtgccgccgcaatctgaagcaaattcactgtcagggcttcccatgaccatatcaagcagccgctgcaaatctcttttatgttgaaccttactaaaacctaccgctctcaaataatcatgcatataaccacctgcaaatgatttctacttggaaataatttcaataccgccaagatattttctcagaacttcaggaacaacgatagaaccgtctttcagctgattctgctcaaccagtgcaggaagtacacgggatgtagcaagaccggagccattcaatgtgtgcatgaactggatagaacgatctgctcttctgacacgcatattgcctcgtcttgcctgataatctcttgcattggatacagaagaaacttctttgtaaccattcatagatggaatagaaatctcgatatcgtatgttcttgccatagatgcagaacaatcacctgctgccagtttcacagttctgaagtggaagccaaggcctttaacaaggttctcagcctttgttacgagttcttcaaacgcttcatctgacttctcaggcagtgtgtactggaacatctctaccttgttgaactgatggcctctgaccatacctctttcgtccgctctgtaagaacctgcttctcttctgaaacatggtgtataagagaagaatttcttcggcagatcagcctctgtcaggatctcatctctgtaaacagatgccagcgcagcttctgctgtaggcagcatgtaatgaattctgccttcatctgttggattagcaatcttataaacttcatctgcaaacttagggaactgacctgctgtcagaccacactgatattcaagcatgtatggcggcatgatcatctcatagccatcagccagatgtgtatcaataaagtagttcagtaatgcccattcaagacgtgcgcccatgcctttgtaaatccagaaaccgttgccggccagcttaacaccgcgctcataatcaatcaggccaaggtttgtacagagatccacatggttctttggctcaaagtcaaacttcttcggttcgccaaaataacgcagcggttcattattctccttgccgcccggtaaaagatcatcatccggcatattcggcagacaatataaatcctgctgatactcgttcacaacatctcttaactgtccgtccagcgcggaaatcttgcctttgatctcacccatttccttgaagattgctgttgtatcttcaccagccttcttcaatgcaggaatctgtttgcttactttattctgttcagccttcagcgcttctgtctgctgaaggagtgttcttctctgttcatctaactcgagaatacggtcgatcaattcgtcacaatctacctcttttgccttcaaaccggctttgatcttatccggattctctctgattaatttaatatcaagcatctttgtcacctcatcatcactgcccgcccaggggcggatccattcattcttatcgagcattaattataccattgtaaaaatactttttcaatacttctgcctgccctttctttatcagcatactctttttcatgaacgcatatactataaacatggcattttactccgcgttatttcaaattctgcttttgaaaggaaatataaccatgactgattttttatatcctgatattttgaatgaacaactgacctatgccagacaggcacgtgccgcatggctttggaccaatgttgccgaacgaagccggatttttctgcaagttctggatacccttcagcccatctgcgcatcccttgcccgtgacagcgtccaagagacgggctacggtatttttgaggacaggatgctcatgatcacacgcctgcttcgtgacctccgttcctgctgccttcaaacagaatctcccttttcagaacgtctttcctgcacggacacacacacccaaagccagccctccggcactttgcttggcataccatcatccatacatccggtcactgaaaccctctttgccgctgctattgccattcaaacaggaaatccgctcatttttttcttttctgacagtgcatttcagatatcggcccgaacagcctccctggtccgtgatgctgcaattgctgccggtgcacctgacaactgcattcaatggctggaaattgctgatgacaacctgcttgaaaaatgcaatcactgtcccgacatcagcggccttattctttccggactttccgccaatatccgcaaagtattttctgctttttcagcggaatgtatcctttcctttccacagccttctttctgctatatccactacagtgctgatccgacacttgctgcagggcagattgttttatccaaaacctttgacaacggaatgtgcttgaacggtgagcagataatctgtgccgatgctgtgatcctgccgtcgctgaaagatgccctgcgccgcaccggcggttattttgcatccccggaagaaattgtccgcctcactgcgattcttgccaacctttcggacaatacagttaatccttctgttatcggacaatctgcgcaggcactggctgatctggccggtattgtcattcctgaagccacccgcctcattattcttgaaatcgaaccggataatgcttcccacccacttcttgtgccctttttgtgcccggttcttgtactgatatcggtgaatgattatgaacaggcagccgacaaaattcgtcttttatccacaaaaagtgcatctttttccactgacttccctttttccgacacccgccccctgccgacacatcattatcttgcgctttatgccgccgacaatgcaccgatttcatttttatcctatgcacttccggatttttccataattgaaaatgctccggctgcttctgtatccatgatccagcaatatatggatatctatggccatcttcttcctccttcagccattcctcagcttttttccatccgccgctgccattcgacaatgatcgaaaccgcccgctgcttttcttttcctgcagaaatttattatggacaaaatccccttgaacaactgaaactttatgaacatgaagaccatcttctctttctgcagtgtcctgcattttcagaatctgccgttcagactgtcataaaaaggatacagcaaaaatacccctttattcagtatgaatgcctaaagcttgcgcccgatgattcacagatcactgactttctctgccagcactcgctttttcctgaactgcctgctgcaccggattgtctcattgtcatcggtgacagcactgctgtccatattgccaaaatgctcatgacccgttatcagcaatccgcaagttcttccctcccacgcctgatcatcatgacttcggatgccggatgccatgcggcgcttctgcctttttatccacactatgacagctgcagcaaccgattgacagatatgtcctgccagctttcccattttacattgattgctgacagccatttttccttttttcgaagccacaaacatctgatcagtgcctgcatggctgctatggccgatgcttttgattctctcttattcgtcggcggagatgatatttccgatgctatggctttccgttccattcagctgtttcttgtctggcttccgctttttttgtccgccccctccgaaagagggcatcaaaaaaacaggcctgacgcctgtttggaacatttgcaaaatgcatgtattttatccggactggcctgttctcataccgacctcggcctttctcatatcctctcacaacaattatgctgtgaatttcggatatcgatgtctgccttgcaggcactcctgataccccgtctgctcctgtattatggcagtgattccacacatctctccggaaaagcctggacggtttcttcctccgcctgctctgctgataactatttaaaaatgctggctgccatcaatccatccttcgacggaaaccgacgggcagccgatatactggccgaaaaaattgacacacttcttgatgatgcccatctcccgaccaatattaagagctgccatatccgagaaaaagactatcttcagcgcatagaggacctggctctgcgcagttttgaacagttatccgccatctgtgccgatactggatccggatatccgctggtcagtgaaattgtccggattctaaaggatatctattagattctgcctgtagatccaaaaccgcctgcaccgcgctctgtctcatccagttccgctgtctcgacaaattctgctgtcaaaaacggtgttatcaccatctgtgcaatacgttcaccgttctcaatctctgccggctgattggaatgattatgcagagcaaccataatctcgcctctgtaatccgcatcaataacccctaccttgttggctggtgccagacctttcttggttgccagcccgcttcgcgcataaataagccctgcataaccttcagggattgctgcactgatgcctgtatgtaccagataggtctcacccggtgcgatcgtcactgcatgatccatacatgcatacagatccgcacctgctgaaaacgctgttccgtatgttggaatgattgctctgtcatccagtttctttatattcacctgctgtttcatcttcatctcctcctaattctctctgacctcaacatgaacatattccttcggctcccagaggacaatatgaccctctttcaatgagggctgtacttctataattctctggttcgatgagcccttaaactgcaggctcgggctcttgagtgcctctttaaactcgccgtccaccagcacatcaatataagacagcatctcttttgtctcttcccactgctctgccattcttccgagaatatccttttcaaaatcatagcctgtataacaccagatattcttctccgggaatcttgcctttacttttctcaagagtggaagcagtccctgctggttcacatgctcaaagggctccccgccaagcagactcagacccgcaatataagatttgtccagataatccagtacctgtttctccgtttcttctgtaaatggctttccgtaatgaaaattccatgtctcctcgttaaaacatcctttgcagtgatgcgtacatccgctgacaaaaagcgacacacgaacgcccttgccattggccacatcgcagtatttaatatctgcgtaattcaaattcatcaaccttctattcagtaaatatatttgttccggccgtgatcacatcgccccgacccgattcacattctgtgccagctgtacagacatgcatccttatcattatatgagaaaacaacatgaaccgcaagcagcaaatttatgaataatacctctgcgttaatttatcctgcgttaatttatggattgcatttcttgcacggatcatatccctgagcgatcagatcatccctggaacctgtgtattcctttttattggacgctttcatctgcttcacactagaacaggacggataatgaaacttcttggtattcgtattcaatatgtactctgtccctgtgctgaccggtgcgcttgtctccttgacggattctgtctgaaccgcagcctgctgtgtaccgcttttgtctgcggctgactggctgactgcagaattgccgccggaactgctgttggaatttcccttttctgaagacagccagctgtcaccggttgcatagtctattgtaattcccggctgaacattgtacgcataaacgcagaagcaaataccgtcgccttcatcttcgacagaatatccctccatcagtacgccatccgctacaagattatcgcctgtaaatataggcgtcactctataaagcacatggttatctgtttctttcacgtaatcggccaccatattctcaaaaggcagcatcccgtccacattcagataacgtgtaccggtaataagattctgctgattggcattctcagcagtcagctgatagccaatcagatgacagcgattgtacagcgacttgccgtccacattgtcatatttaactgaatgccatcctgtgggcttgacttcgctgatgctgccgcgcttctctgtaggcattgtctcaaggcagacattggcataagccaccccgcagcgtccaagcgcatccaattcactgtaattctcaaaagcttctgttgtcagattatccgatataaaatagggttcattattgttgacagctgtatatggttccccggaatatgccggaacatctgctgcattaaatgctgatgcggtaccggtatgaaccactttttgctttgagtcatccgactggacttgtgcagcagcctgtatctctgtttcagctgctgtctgtatctctgtttcatccccaggatcattctccgcagattccgtctgaaccgtctcaacataagattctgtttctgaatcttctgctttcagcataacctgggttgctgcaccggatccgcagccaaccagcatgcacagacacaacaacagcgtcaaaaaataacttaacttattgttccgcttattgcttctcatcgttcataaacctccatcgttatcttctcatgagaaaatcccacgaactcctcttcctgaaccttagccattttggaaatgtcaatatccagatgctgatctgccggataaacacgattccatttaaaaacgatgcattcatctattttgtcaaaataagtcgccagcggctctttctcgacaaaacacaaatcctgtactcctgcttcctccagataattctcagacactgcaattctgttatcttccggaaatatcttagctgaatacgtattcatatacacgctgcaatcacgctcatcagccatctgcagcacgcgctcacaaagcactctgtccctgctctgtctgcgatgattaaacaacatacctccattgtcatccacgcaaactattactcgcattattactcctccatcatcttttttctgacatcctattgcgctgcttaaaatctctagcgcaattattttgccagtgctgtcaacaacattggttgtcaataaattcgtcctcacacgacataaaactattataccatacatcttcttttttttttgaagcaaaagtacctggcttttgaaattaaaaagacgatttttacattattaaatgctgtaaaaatcgtcttttttttggtttttggtttgaattacaaatgcatcactctggcattaatctctttcgtcttacccacattccagaaattctcgccaagataaccgcatgtacgtcttgtaacattcatcttagagtgatccttattgccgcactgcggacattcccactcaagatcatcgttgatcttgatctcgccgtcataaccacagacatgacaataatcagactttgtattaaattctgcatactgaatattgtcatagataaacttgacaacttcctctaatgcctcaagattatgtctcatgttcggaatctccacataagaaatagatccgccggatgaaatcttctggaactggctctcaaatgagaacttgctgaatgcatcaatcttctctctgacatccacatgataagaattcgtataatatcccttatcagtgatatctttaatctcaccgaacttctcaagatcgattcttgcaaaacgatagcaaagagattctgccggtgtaccatatagactgaaaccgatgttcgtctcatcacgccatctgtctgctgcttccttcatatgattcatgacacgaagtgcaaactcctcgcccacaggatccgtatgactgacacccttcatcagcttggttacttcatagagtccgatatagccaagagacatggtagaataaccgccatacagaagcggatcaatcttctcacccttattcagacgggcaatcgcaccgtactgccagtgaataggactgacatccgataatgtacccttcaacgcattgtgacggcacataagcgcctcaaaacataactgaagacgttcgtccatcagtttccagaatacttcttcattccctttcgccagaataccgatctgcggcagattaatgctgacaacaccctgattaaatcgaccttcaaacttatagttgccgttctcatccttccaaggtgacaggaaacttcggcatcccatacagctgaaaacattgccttcataattctcacgcatcttcttcgcagaaatataatccggatacatacgctttgcagaacatttcacagccagcttcgtaatgtaatcatatttgccaccctttaagcagttgttctcatccagaacataaatcaactttggaaatgcaggtgttacataaacacccttctcattcttaataccttcaagacgctgtctgaggatttcctcaacaatcattgcattctcttcaatgtattcgttattctcatccagattcagaaagagtgtaacaaaaggtgactgaccattggtagtcatcaatgtattaatctgatactgaatcgtctgaacaccggacttcagctcatccttcagacgatcctggacaagtttctcaatggtatcatcatcaaattcatcgccaaaatgtgctctataggccttttcatacttatcatggctcttgcgcagatacttgccaaggtgcttcagatcaacagactgtccaccatactgactgctggctactgctgaaatgatctgagtcatcaccgtacaggctacctggaaactcttaggactctcaataagcttgccgttcataacggtaccattgtccaacatatcctgaatattgatcagacagcagttgaaaatcggctgtacaaaataatctgcatcatggaaatgcagaattccctcttcatgggcctttgcaatcttctcaggcaaaagcagtcgtttcgtgagatccttggaaacttcgcctgcgatcaaatctctttgagtggaagctgctgtcgcattcttgttggaattctcttccataacctctttattgctgttcttaatcaagctcaaaatcgaatcatctgttgtattggcgcggcgcaccaactcacgtgtataacgatacacaatatatcgcttcgccaaatcaaacttccctaaggccatcaatttctgctcgatgatatcctgaatgtcttcaacaagaattctctttcgctttctagtctccacataagaaacaatctcttcaatctcctgattcgagattctctcttcttccggaacctcctcattggctttcccgatagcaactataatcttactgcggttataattgacttcctgtccatcccttttgataacaatcataatgaccttcctctcatctataagaaacaatatcatgttgtctacaaacataaacaacaaattaaccacaaaatatagtaagaacattcgttctattcctcaaacgctccgtggactattatagcacgcttgtcattaaaataccataggaaatatctcgaagaataaatatcgtcacttttcacgaattttaaaaagttttttctgtacagcagatcattagcgaaaaaaaaagaccctgaaataatttcagagtcttaaaaagaatgagacatccggggttcgaacccgggacacctagattaaaagtctagtgctctaccaactgagctaatatcccatcgtgcccagaaccggaatcgaaccagtgacacgaggattttcagtcctctgctctaccgactgagctatctgggcggagttgcgggggccggatttgaaccaacaaccttcgggttatgagcccgacgagctaccgggttgctctaccccgcgatataatctaattgtctgtttagacacataagtacctgacaaactattccatttatcaagtacttcaactgggcggaggtggattcgaaccaccgaagcgtgtcgcagcagatttacagtctgtcccctttggccactcgggaatccgcccatatctctatatagtttttatatcgagaaaagccgatgatcggactcgaaccgataacctgctgattacaaatcagctgctctgccaattgagccacatcggcatcaatggaacctatagggctcgaacctatgaccctctgcttgtaaggcagatgctctcccagctgagctaagattccatatgaacgacccagacgggactcgaacccgtgacctccgccgtgacagggcggcgctctaaccaactgagccactaggccatcaaaggtatgcaccttcaaaactgcatattaactaaacacattctttagaaccattttggtcaagccctcgaccgattagtaacagtcagctccgaacattactgcccttccacctctgccctatctacctcgtcgtcttcaaggggtcttacttctttcgaatgagagatctcatgataacatgttcacgtctgtcaatgagcaggtgggaaccatagccgggcaggtgggacagacaccgcagggatggaatgcagggatttttaatctgattcagaatatatcccaaacggtgattgtccccattgcgggactgatcatcacctttgtcctgtgctatgaattgatcacgatggtaacacagaaaaacaatttccatgaatttgagacttataacattttcctctggatcttcaaagcgtatgtagccatttatctggtgacaaatacgttcaatatcacgatggcggtctttgatgttggccagcatgtggtcaacaatgcagccggggtgatatcaggaaacactgcggtggatgcaacagaagcaatttcacggattgtggatgccctggaggatatggagttaggggatttgttcctgctatccatggaaacgatgttgatcagtgttaccatgcacattctgtcaattatcattacggtaatcttgtacggaagaatgatagaaatttacctttatacttccatagcaccaattccgtttgccaccatgaccaataaggaatggggtaatatcggaaacaactatttaaaaggcttgttcgcactggcatttcagggattcttcatgatggtctgtgtgggaatttatatcttatagactctcggcttataggtaacacagtctgcctccagaccgctttcgaccactttaggcagtggttacggttgctctcagcctttgtcatggggcttcgtacaccagccattacagctaatgcacgcccatcaagggtaggcgtttcagggcgttaccccgtcattccacctatcaaactaccagttctccgaacaacggaaaaccgttgctcgtgcgcagactttttaccgtctgcgaacgagtcgcactcacccaaaaatcttcggaagctttttccccttcgcctttggtattaacaataattgttgtaaccagcttcaggatatctttttcagaccgtatataagcaaatggattgtaatgaagcgatttggaaaagttgatagtattcagaaccttaatcacatatggttcgtgtaccacttttcctgatttatctttcataatatttccattcttatctttcttaggtggtccctttgctaacatcttcccgcactcctcgatcagagtgcctttcggatctgtaatgaccatggaacagttcatctgcatgactgacggcttaacgaaaaatcgagtttttccggaaccactgccgccaatgaccactatatttttatttcttgcatactttggctgtttaggtctactttccatagtcaatgcttctgttgctgttaatggaatattcatccagggatcttccgacatataaggtttaatatcctcagcgtttccccatctggctgaaccatactcgattcctttccggagtttctttgcatctgactgtttctgccataccagtaatttcagaatgacagctgctacaattcctgtcagcatatcacgccagttaaaacttggctgcaatccagtaagaatcctgtctgcatgttccatcgcatataatagcttgttcccaatatcttctcccagactgtttctgtaaagaaatgatgcccgatttgtataaaaagcagttaagatatatgggatattggtaagaaccagtttctttttatccagggcggacagcctgaccctgatcttattcttccatttttgcatcagatttttaccgatttgctttttcatcggctctgctcctgatgccggttctttactttgtccttcgatttctttggcatcattgctctgtaagttgcaagacgcttgtgaatagaaggcttattcgctttttgaatctgtttctgggaaaactcacggaaagcagcattgagggcatcctgatcacgtcctttaaaaaacaccagatacatcggtggatctttactcttatcttttttcaaagcataattgatcccgtattttctggcataacgttcaaaggacttgatattcttatttgtgatctcgatattgaccatcccggcattttgttttgccagctcttttaccgtgacctttccctgtttcggctgattcttcttcgctttcttctctaccgatttctgcttctgatgacgcagataagcagcaagaacctttttcaataaatctgctgttactttggtagtccgaatgcagaacgtgaccgttttctgagttacctcttcctgcatgattttccctcctttcagcgatttaactgctgtccagatctgtaatcatggcaaccacctccttcattctttactcttcctccgcacacaacgctttaaaaaattcttttccttttggtgtaaccaatgtctgtgaaccaagatgtccattgttaaaatagtcttttacaataaacagatcattgttcttctccaccgcatagggtaacagcgtgccggatggactcctatatagaaatcctctatttaaaagaagtttcacaaattttctttctggaaattcaatctcttttgccgtcgttcgaatattggtgcattctcctgtaatcatgaaatgatcataataatctgcttttggctgcatatcctttacacgattttgcaattctcgatttcgattgttttctgccaaaagtctctcggcaaattccaaaagaagttccgggttatcttttaccctgtctaaaagatcggtctctaaatatccgcctgttttcctaatagccggaagtacctcatcaaatacccacttctcaaaattctgtgctgactttaaacgactttttgtaatcagccgatatacatctccctctggaataaaaatcattggctgtaccccacctgatgtaaggacgccccgtttcagggcccccttgcaatgaacatttatcgcatttcttggttttgcatatcccaaagcaaatgctacatcaattccagaaaataaaagtctgcctccatcttcaatcatacggatggaaccaaactccgaattgtgaaactctgtgattttataatccgtcttctccatcctcttctccatcctcttctcctcctgaaccggcaagtaacatcaaaccattttcaatgattgtgctcctaataaactctgctacattcacggttaaataaccaagatattctgcaaggaaactactatattcctcttctgtcaacaattcctccagtgcttccaaatgagctgtcactttagaagtctgctttccgccaagcagcttgcctaatatttctgtaaattcctctgtgtcacatgactcaaacatacataagatcatctccattgttgtttccaaaaccaaacgatccattttcatttgcgtcagctcttccattgttttcatggcagtcataagcgcatcacttgtcatatgttctgtattgattcttccttctgaatcaaccaatcctattgcaaataattctaaaaagtattttctcataaatcttgtcctcctatcgaaatggcatttcttgttcaagttcttctggtatatcgaatggaatcttcctcttctctgctggttgaaatccgtcagattcttctttttttgttttggcttctgcaaactctacattatccataatgacttcggtataataggatgcagttccagtctgttcatctttgatctgagagattaccaactctccggaaagagcaatcttaattcctttttcaagatatttctccacaaattctgcattatttccataagctgtgatcatcactacaaatgctttgcttgtgcgatttctttttactaccagtggaaacctagatactttggtttgtcccttttgcgtagatgtcagcttagtttctggatctctggcaagtctacccattaaaacaatcgtattcattctttttgtcctccctttcttcctgcaacacccttccctggtatttcaaacaggataataatctgtgcattttctgcacgaaaaaatgaggaatggattcgaaccattccccacttgctacaggatttctcctgtaatataaataagaaaatctaagtattcacatttgggctttgtctgtacatatacatctgatcgttatcattccagataacccggctgtaaaaatacagtcacagtctctgtttcagcagaggtcctgtacccttcggtggtatcattattgcttcgctcttcccgtaggagtcttcgcctgcacgagccggattatctccggtaagcatgttcctcaagatgtatcagctccttcaattgtcaaggtgcaatcggaagaactgtctgaacctcttttacgtttgtgatttttggaaatcagaggattttcaatttgccttccatatactctgtattgggagcgacaaaatcggacatgattttagaaattttttgaaattattttttgaagtgtaaaaagatataaaaaaaagatgccaggatttctcctgacaccatagtgactatgccaacttcgtgcccactgggcacaaggttgattgtattattcttcatttcctaatgatattggttctttctttgttttcttgtttttagatatcatcttatgacctgtgtaaatagccataatcatacaaagcaaagaacttgccgcaaaatatttatggcttgattttgaacctttatatccgctataaaaagttcctagcatcgttatcaatgctccgacagaccaatattcatgagctttcattctaacatctccctttgtgttaattttaatatgtaccgtttgatgaaatatgcaaacaggaatttggaacgtgctttataaattttttccgatcccctcaagttcgttcatggaatccttgtttttttcaagttcatctctggctgttgcataatatgattttttgaaaagcatatcccatgaaagatattttgccatacagtcaaactgcttatcaatcagctcatactggatactgtctacgggagaaccgcctacaacaatcgtgccaacttttttattttttaactgcaatccacggcagtagcacttatcaatgataagtttcaattgtgctgacattccccaccaataaactggtgtagcaaaaagaatcatatctgcggcagcaattttatcaattgtaggatttgtatcatccttatcgacgcatcccttagagcattgacagacaccacatcccttgcatggtgcaatgttgagtttgtcaggttcaatgatttcaatttcattcttttctgatgctccttttataaatgcattgattgctgtcagcgtgtttccttttctggcacttccattaatgattacaattttcatgcgtgtatcctccaacttccgatttcatgatatcatttctaatacagattttaccgtatttttcagattcagtccatcttttaatcccagtcgatagaaaaattcttctgtttctgctccactgctaaaaattgcattacagtattccgtaatcacttcttcctgttcttgggataacgtttccagtaatttctggtatttcttatcaatctcacttactggctctttatcctgctttaacttccattctgaatatgctttccccatatgctctgtaattgtcagattcacaaattcctgcacttcctcggatatggtgctcgcagattcctgtttatctttctttttatcatttgatttttcaagtgtcgtgtcatcaatataacgaatgatttctcgaatatttgacttcatcgactgcagatatcctttcatcagcacagctacttttctagcatccgatttttcggtttctttttccagcatataaaactcttccagttctttcagaatatccatccctgctttcatctgaaattccacctcaagcaaatcatccatcactttatataattcttccattgtttatttctgcctttccatatagcgccactatattttccacaatcatccaaaaataaattcctgtaatccacatttcacaacttcaattactgcaactatccccataccgatatgtgggagtagaacaaacactactgtcgtaataatcgctgatttcattgtccagtccgtactgattccaaacccaatactcaaaacttctgtcacaacagagattccggctatcagatagcagaatccagcagataacccaaccaggaacaccagcacaatattcaccgctgcaagtaccagccaaacaggagctgcaataattcgaaatggcagttttatcataaatctcaacataattcttcctcctactttgtgcccagtggacacaaggttattttagcatatctgccagatatgactatctctttttaaacttcgtgcccagtgggcacaaagttcttacctgtctggaatatccttcccccagtacatgtcatgtcgaacttcagcatcataaaactgattgattgttgcaggagcgttatacaataccgtcagcatatactgccggatattcttcactttgcttgtactcctgtcaagactgaaaaacacatactggatgtgttcatacccgactttgagcaaacggctcttgaccacttgtgtaggcacagcttccccattgatctgttgatatgtctttgtcgaacatattgcatccagcatcagctctaccagctcttctactcgtccagttccatagctctgacaaaggatctcatattcgatattatcatgaattaactgtcgatactcatttctctcctgtatcctatctctccctttctcttgttcagatagatattgataagattcattctcactaaattcagtataattatattcagtattattacagtttgtttttgaaacttcttgaagtttgttttctaaacttcttgaagtttgtttttcaaactccttgaagtttgtttttgaaacttcttgaagtttatttttcaaacttcctgaagtttgtttttcaaacttctgtgtatttacgggcttttccggctcttttttcgcatattcttctatttctgtctctgtattttcttttctctctgctacattttccggtgtttcttccgaatcaaagattgctggctcatctggatattctgtcaggctgaaatttttcacgtaaataacatttgtttttccaagtccgattcgcctcttctcaatcaatccaatccctttttcctgatccagctcttttagacaattcacagccttattcctgccacagttaagcatttccataatctcttccaccgaaaagaaaatatatgccctgtcctcttcatcaaaccaccggttcttgatggacagtgacatccggtctaacatcagtccgtacagcacctttgcttcgcaggagagatttttaaaatattcacttgtaaacagcagtttgggaatacgataaaaactgtacatatcgcattccattccttgaaaataatggaatgttgctcttatactcatgacacatccctcccttcgtacttatcaatgattctgattgctccattcctccaaaagctgacatataacagtccgtatcttctgttcatcatactctggaggaaaatacttcttaatttcatcctgttttaatgttaccgttgttttctttttacgctctcctataaccaggagccgcacaatctcttttgtcagcgttttttcttctcgatgttgccttattttttttgcctgttccagacttggatattttccggtactctcatgcacttcctccaccatctcctgttctggaaccgtaaggtaggaaagctctacacctacctgcaatccgatcacatcacgatctactgcgtttaataggtcattcatcagataagtaagccggatatagcgatacacctgccttgcactgtcatttgcgttctttccaatgtctttcgcactgataccgcctgatgttccctgatgattcattgcttccatcttcatacggtaagcaaatgccttttcacttgggagtatattaggtctctgcagattgctgtctaccatcgcacggacagctgtatcttgatccatatttctgataataaccggaacctctttaagaccagcaagttgtgccgcatgtctccttctgtgaccggcgatgatttcatattcaccatcacccagcggtcgtaccagtaatgctgtaagaattccctcttctttcacactttccaccagttccgccattgcctcatcatcatttacttgaaatggatggttctcgaaagaatgtaaatgctcaagtgaaacctgctggatatcgttcgtttcttctcctcctccaagtaattcatcataagatgtcagttttatcttcgatgcacttctacctttcatccaaaagcacctcctgtgtcatctgccaatatgcagccgctacttttccttttggatcatgctcaaatatgctgattccttccgcactgatttcagctgctcgtactgaaaatggaatactctgtggaaaaatcttaatctggtttccatatgtatcaaaaatcagatcagatatatctcttgcatagttcgttcggttatccaccattgtgatcaatatacctccaattttcagttgtttgttaagctgtcttcgcacctttcctatcgtccgtatcagctgttctagaccctttacaggaagataagccgcctggacaggtataataactgcatcgacactggcaagtgcattgatcgtcagcattccaagtgatggcatacagtcaatcaatatatagtcgtattcttctctcattctttctatatattgttttaagacaagttccctgctcataatatttacaagtgaaacttccattccagagagttcgatgtttgccggaatcaaatcaattccttcctggtgatgtaaaattcccagtgtattttcaaatagttcatcttctacaatctttgtcagaatagtagccagtgtgattggtaattcatctgggttatgatacccaagacttgctgtcatacttccctgcggatcattgtcaatcacaagcactttcttccctgcttttgcaagtccgactgccagattcacgcaacttgttgtcttgccaaccccgcctttttgtgaacacaatgccagcactttacaatccttcattactttctcttccatcctttttatcctcccataaataacttgaacctttcagcatccataatgctgcttccaaaaatgcaagataccgttctgtcatactatcaagaaccggttctgaaataactggtttttcagacttcaaatcttttgccacatcctccaaaaccaaactcatttccttcatttctgaccggataatctcaattgtttctttctttccaacaacacatacatgattgtaaatgcatgatcggacgatataatcctgttttttcattccgctcactttcactcgttcttcaattgttgctttttcataagaattcacccgaaaagaaatggtcgttgtgttgtgttttccatgtctgtcaccagccatcgcttattcctcctcttcctcatgtttcttatctagcaaacctgctaatttactctgtgtagacggatacagatgtgaataagtgttcaacgtggtttccaccttttcatgtccaaggcgttctgcaatctccaatggagccacccccatatcaaccagcatactggcatgggaatggcggagatcatgaagtcgtatccgctttacaccagaccgctcgattccggtagccatacaatgttccatatgcgatttggtaaaccgaaaaagtctttcctttttcataattccatacaaatgactgcaatactccctaaattcctctgcaagaaaatccggcatcgtaatcacacggatactctttggagttttcggctgcgtgatcatatcctttcctttcagtctctgataagatttattgattgatatggttttctcttcaagattgatgtcattataagtaagtgcaagcaattcaccgatacgcattccggtccagtacaacaaaagaaacgccattcttgtctccggcttatcacttactgtttccagaaaagcattgaactcttcctgcatccagaagtccttcggttctcctttactcttgccaatcgctcctgccttcctgcagggattatcctgcaggttataataccgcattgcataattgaagattgcagtcagctggcagttcactgttttcagataagtaggagaatatccttttccattcttatccttatacgtcagcaactcattctgccatgcacggacgtctgccaccgtaatttcactgagaatcttcttttcaaaataaggcttgattttcaggtcaataatatatcgcttcgtgtacatagtgttttctctgagacggacatccatatctttgtaataaatctccagaaaatttccaaattcaatatccacaccctggctctgctgttgcaggaaatctctttcccattccttagcttcacccttggtcctgaatcctcttttctgttttcttttccgatttccctgccagtctttgtaatagacctgtactttccagttttttccttctttgtaaacccccattgctaatcctcgactttcatgccataaatcttttctgccaggaatttcgtagagatttttccagctactacaatatagccttttgccttcaattctttgttgtattctcgcatcagactatatgcataagtttttgaaactccaagaattgcacacacatcatccacatccatatacattttttcctgcatcatactcataccgctttatcctccttcaaatactgctcaacatgttccagaccatagatcttgtcctctacatagcgggttggcacccgaccgagaatcacataatagttcttgcttgccagatcggcattcattctttccactacccggtaagcaaacgaaactgataatccaaagagttctgcaatgtcttccactgataaatacatttttctcttacgcatgaaaccattcctttccctcttcctgtggaatctcacaagtatcttctactccgtagaaacgcttcacaaaatactttgtcggaacttttcctctaagcgtcaggtagccctgttcttccagttccttgttcagatttccgatgatttcataagccgatgtctgttttacttccagaagttcacatatatcggctgcctttaaaaataatttattctgcataatcagtacctcctgtgttttgaatatttatctcttcatatactctgtactggcagatgcaaaatcggacatcattttccgaaatttatcaaattttcttgttttttaattctccatcagtgtgattactgtgtcatggagtttaagctcatcgaaagtaaagaacctttctgtggtatctgttttctaaatgcaggcaacaaaaaaacagtctgccttgacgaaaatcacttcaatcaaaacaaactgttcttcatatttactctaattttattttatgagaataaccgatttcacgaaatttgcaggtgaatctggaatataaacaagagaaaaaaataatttttaaactccatttgcactccatttggtcttttcgacaccccgcaaagcctttatttatgggcttttccgcgatttttcaagctactcaaactcgatggtcgccggaggctttcctgtgcaatcgtacataactctgttaacaccttttacttcattaacaatacgatttgtaacctttgcaagtacttcccatgggagctgcgcagcttctgctgtcatgaagtcacttgtgttgaccgcacgaagtgcaatcgcataatcataggttctgaagtcgcccatgacaccaacagaacgcatattggtcagtgctgcaaagtactgtccaaggcctttgtcaatgcctgccttggcaatttcttcgcggtaaatgtaatctgcttcctgtacgatcttaactttctcttcggtaacttcgccgatgatacggataccaagaccagggccagggaatggctgacggtatacaaggtactcaggaataccgagttccagacctgctttgcggacttcatccttaaaaagcattcttaatggttcaatgatctccttgaaatcgacaacatctggaagacctcccacattgtggtgggacttgataacagcagacttaccgagaccactttcgatcacgtccggatagattgtgccctgtacaaggaaatcaacggaaccgatcttcttcgcttcttcttcgaagacacggataaattcttcaccaataatcttacgtttcgcttccggttctgtaacacccttcagtttgtcataatatctctgctgtgcattgacacggataaagttcagttcgtaagggccatcagggccgaaaacagcttcaacttcatcgccttcgttcttgcgcagaagaccatggtcaacaaacacacatgttagctgtttgccgatcgctttggacagaaggactgctgcaacggaggaatcaacaccgccggataatgcgcaaagaaccttgccatcgccgattttctcacggagagacttgatggttgtctcaacgaaagaatccatcttccagtcaccaacgcatccacagacgtcatagacgaaattgtggagcattttcataccttccttggtatgcataacttccggatggaactgggtagcatataacttcttctcagcacattccatagctgcaacagggcagacaggtgtatgggctgtaatacggaaaccttccggtacttccttgatataatcggtatgactcatccagcagacggttgtatctgcaacgtcgtggaagaggacagaagttgtatcaacttcaacatctgtatggccgtattcgctgacaggtgcagttgctacttcaccgcccagtgtgtaagccatcagctgagaaccatagcagatacccaggattgggatgccaagttcaaaaatagctttttcataatgaggagaagtctcatcataaacactgttcggaccacctgtaaaaataataccctttggatttaaggccttaatctcgtccagtgtcttagtatatggaaggacttcacaatatacattacattctctgactcttcgtgcaattaactgattatactgaccgccaaagtcaagtacaataaccatttcttttgccatggtgttccccctgtatctataattgaaatattgaatagttgtgcatgcttcataaccgttcgtctacttaagaaaagttaatacaatatgaagtgcgttttgactagattttacactatttaaaagtaaaatacaagagtcaggcatagctttttcaaaaaagagaataacattagaataatgttttttcctgcacttcttcataagcagccgtattgccgcgctgaatccttataaaatcatcatctatcgcttcaccatattcccgaccattctctgtattcttccgatacaagacatactgtacattctccgtgcataccataccattcaaatcagctgcaaccggaagaaaagcctgaattctgatatcgtatctctgaccacctgcactcaaaagaatgcgcttctcttcctctatttcttcaatcagcgcctgctcacaatctatgcctgcattctcaagcacctgctccacaaagcgctctatccattggttcggattatctatttcaatgttgttaataatcttcattgttctctccatttcatatttaaaactcacgtgacatgctcccaccacttaaatcacagattttgaagtgggggcttcttgctcaatggctctactgagccaagtatcggtgagttgcaaaagtaacttctactttgcagaagtaaattctactttgcaggggtaaattccatacaaaatagaaaaataatgacttagatatatgaaatccctgaaaacggagttaaaataataaaaaagctgcggttttggggattttattgcatgctgagcggaagtcgaatttacgttaaaatttttggggagagtaaattccacctctgggggcgttctgcgatgatggctgctgatattattttcctacccagcttttttctgttagattttggttatttcaataattcaggactgagaacgatttcatccgcagggatcttctgcaggtgaaatgcatctaaaatttttttgccatattgaaactcgaagacttcatatggacttttgttgcccagtttctttctggaataagaattaatgtggctcatcatgagattgatctgctcctgtgtatagcgtccgatatctgtgccttttggaataatcctgcgtatgagttcatggttgttttcacagcttcctttctgataaggtgcgttggcatcacagtagaacatttttgtcctttgatttttctgggcatccagttcaatggcagaaggattggaaaattcactgccgttgtcagctaaaaggactggaaaaagctgaatgaaaacatcggatcttaattcaagataaaggcgttcaaaaatgtcaatgacagactgtgaatcgttatgccggcggagaaatgcgagctggagctgttgttccacgaaatgtatagtaagaagaacagcacctccttttaaaccttccacagaatcaagctgtctgacagaggcatcgggatggtcagccatgtacttatgaaaagattgaaaatcacggccaatacggcaggacttatcaactttgaggttagaagaaacatttttccttggccgcatacggatggtacggggcatgtcgatatttctggcggtaaagaggccgctgttaatgtagacatagagagtcctttcagatttcataagttcatcagcatgatgaagagcaatgtgatgaagggactgtccctttttgagaagaggagacaccacatcatcaagctgtttaagttcagcctcggagagagcgaaaccggaacgggattcgcttctgacctgttcgtattccttctgtgcaaaggcagctttataaagctgttttttcagagagcatttggagcgttgcgggcagccgttgcagacatagggaggtttggaaagtttagggcaaacgtatttttcataagaatcacaagaggaaaagcatctgccgcaggtccagcagtatctgttatgagaggaggtacagtgctgacaaattttatgaatggaacattgatgaaggaaagccagacggcagtcgttgaaagaacggccgtaagtaccggatttttcgaaacagatatgggacttcacttcttttgagatagtggtacagtctttgccaaggtgtctggcaatggatttaaaactatgctgctggttaagtaaggtttcaatgaggattctggcatcaaggtttaaatgtgtatgcttattcataagggcctccttaatgctgggaggaagagccatgtttatataaagaattataaagtaaaaataggaagaattaaattccacatttgaaagcagggtgatttgcaggattaaattccacagaggggtggaatttaactttgcaatagagtttactttggtttgtgttcttaaaaattctttttaggaattttcgggattgttttgttgttcaattatcaaagttcatgtaccgctctctgagcgactcaactagtttatcaaatctcttgaagtttgtcaacaactttcttcatttattttcaaatttctttttgatctgatgaaaaacttgctgttttgcgtttgtctcgctgacagcttgtatatgatatcatcttagatttgaattgtcaacagtttttttgatttatttttattttatatgcgttttttgttatctgtattaaatctgacacgacacaaagcgcttccatattgttaagaaaacgtcacacctctgatctctgctactcttatcaaccaatacctcttcatccgtcaattctcatcattcgctagataaggtactttattccccttaattctctctgtctttctcatttattatcagctataatagtgtgtaacaacgtaaaggagtacttaaaagatatgaatatcaaaaaaaactattctaagaagcgtcaccaatcctacgcttctgcccaggcgcatgctgttataaacggtctgattggtgtcatcgtcattgcatttatcagcttttatttctttctgacaccattgaatccacagtccattgctttctggctgacactgatcattgcactgtttgtctttgcagctctgaaatcactgactatttgcagtgcagctgccgggcgtatgcaggatcaggctgccgggcaaaaaacctggaaagatgtctgcggacatgaaggcatttttttcatcctcccactcattgcaattatcgcattgctgttgattgcactcagcggttcacctgttttttcgtcacacaaatatgccgcaatcctcaatgtagaggatgctgtcttttctgatgatttatctgaatctctcggcacagactctattgccctcatggacacagcctctgcgagaatgctcggagacagagaaattggttctttatctaatgtcgtcagccagttcaatgtttctgatgactacacacagattgattataatggaaaacccgccaaagtcgctgcactcgattatgccggtttctttaaatggattggaaataaatccgatggcgtacctggctatgttacagttaatccagtgtccatgtcggcctcctatgtacaatgcagccagccgatgacgtatgtaccatccgcttatttccatgaggatgctgcaaggtatatccgtttccactatccgacgctgctccttggtaatctccactttgagatagatgagcagggacagccttattacgtgatgtccgtttacaaaaatacaatttctctgttcggtggtcagactgtcacgggagcgattacgctgaacccatcaaccggcgagctgacacactatgcactttcagttgttccaaactgggtcgatgttgttgtggacggagatcttctttgccgtcaatacaactggtccggtacgcttaagaacggcttcatgaacagtctgattggcaaaaaaggctgcaaacgggtcacgacttatgaagcagatgaagatgatgaaaacgacgatgtccctgtttctgattatggttatgtttccaaaaatggcgatatatggatctatacaggtgtcacatccgtcaatggtgaccgctccaatattggtttcttacttgccaacgagcgaacgggtgaggcacattattacagtatcgccggtgctgatgaaaagtcagcaatggcagccgccgaaggtgaagtgcaggagaaaggttatcaggccagtttcccgtccctaatcaatgtagaaggccatccgacctatattatggtcttaaaggacgccagcggtcttgtaaagctttatgcagccgttaatgtggaacaatataatatcgttacaaccgcttcctcccagaccgaatgtctgaacagatacaaacagcttcttggcatagaaagtggcagtgctgacaataacaacaatcagcctgacaacagtaccggtactgataacgacgcttctaacagcgtcaccggcagtagcgacatctctgaaccaactgttgcagatgccgaaaccaatcttaccattacggatatcaaatacatcgatatcaacggtaacacttacatctatctgattagcgaaaatgataccctttatcgtgcaaaggcagcctcccacgaggacatgctgctgttgaaaaaaggtgataacgttcacattgcatactccggcaaagatattgtcacatgcgaaaaacagaactgatccactaattaaaacaagcgactgcttcaaaatgacatgaagcagccgcttgttttatggatacctgttcaatttgatagatacttaatctccaccagtgtcaatccgtgtgcaggcgccgttggtcccgcagcctttcccatcggatgctctaccgcttccctgacttcctccggttctttctgttccagtccgaccttaatcaatacaccggcgataatacgcaccatattgtacagaaagccattgccgctgacacgcagtgtcacaatatctccttcttcaatcagttcaagggaatagatagttcttacagtactcagcacctttgtcttctgtgaacaaaaggatttaaaatcatgttcaccaaccagataaacaccggcttcacgcatcttgtccacattcagctttttcgggacaaaataactgtataaacgctctttcggcagctgagtccgccgattaagaatccggtattcatatgttttctccacatccgtatagcggggatgaaaatccaaaggcacttcctcggatttctgcaccacaatatcctttggaagacgctgattaatggccagggcatatttccagtcaggaatatttttgtctgtgtcaaaaacggccacctgtccaagggcatgcaccccggaatccgtccggctggcgcctgtcacatcggttttcaccccaagaagattttctatggctttttgaagtgttgactgtatagaaacaccattcggctgcacctgccatccgcagtagtttgtgccgtcataagccaccgtcagtttaattctatgcacagttacatcactcctctcagcacacaaatggcaatcatataaacagccattagcaaataagccatccggtctcttttctcataatgcagtggcttcatctttgtacggccctgtccgccgtgataacagcgtgcttccatggccatagccagatcattggcgcgtcggattgcggcgataaaaagcggcaccagaagcggtacaagcccttttgctctctgaatcagattaccactctcaaagtctgcccctctggcctgctgtgccttcatgattctgtccatttcttccagtaaaatcggaataaatcgaagggcaatagacatcatcatcgccacctcatgtaccggcacatgcaccctgtttaaacagcccaaccccttttcaagaccatctgtcagctggttcggtgttgtggtcaatgtcatcagagatgagccaataatcagataactcagacgcatgaccatataaagacctgtctttaatccctgtacagttgcattcaaaaaaccgatcttgaataaactgtctcccggcgtcagaaaaaggctgaaacaaaaggttaagagaataatcataaaaatggattttaaccctttcagcataaagctcaccggtacttttgacagcgcaatcaaagctaccatcgctgccgtcacaatgataaaagccggaacactgtgaatcaaaaaaacagatatgacaaacaaaaccgttccaagcagttttactctcgggtccagacgatggatcacggaagactggggataatattgtccaatggttatgtctcgtatcatttctcgccgtcctccattctcgtcttcctccataaattcagaatttcctctgctgcatcggatacagtcaagatatctgtggataagtcataaccttttcccgcaagactgtgcataagataggtcatcttcggcgcagaaagtcccattttctctaattccttataacgaccaaaaatttcatgcggtaagccgtccatgaccagttctccctgattcattacaagcaatctctcagcgtattccgccatatcctccatagaatgcgaagataatataaccgtcatcccggtttctctgtataaatgcacaatcgtatccaggatctctttacgacttcccgggtctaatccagccgccggttcatcaagaatcaacacttccggctgcatcgccagaacacctgcaatggccacacggcgtttctgaccgcctgataattcaaaaggtgataaggtatattgttcttctttgatgcccaccagctgaagcgcatcgatcgcccgctttctggactcttcctgagataatcccagattcttcggcccaaaagccacatccgtcagtacatcaatctcaaatagctgatattccggatactgaaaaacaataccgactttcgaacgcaattcctttttcttgtagccatccgctgtgatgtcctcatcgtgaaaataaattttgccagaggttggcctgattaatccgttcatatgctggatcagcgttgacttaccggatccggtatggccgatcaccccgataaagctacctgattcaacagcgaaactaacatctttcagagcctgtttctcaaaagtggttccgccactatatatataattaacattctcaaatcgaatctgcgacatgttccgtcccctttcccccaggctgcaaaatctgttctaattcatgaataaactgttcctgggtcagaataccgtcggaaaaaggcattccctgctgtttcagctgccaggctaactccgtgatctggggaacatccagctccaatttctgaagctcctctactctggaaaaaacctcttttggcgtgccatccatggcaatctgcccctgatccataacaagtacacgatctgcatccaccgcctcatccatatgatgggtgatcaggataacggttactttctcttctttatttagacgatgtacagcctccagaacctctcttcggcctgacggatccagcatagctgttgcctcatccaataccatacaggaaggcctcatagccataatgccagcaatagcaattcgctgtttctgaccgcctgacaatttattcggcgaatgataccgataagctgtcatatctacactctccagactctttgccacacgctgccatatttcttccgtaggcacgcccatattttcaggaccgaatgccacatcctcctccacaacactggcgataatttgattatccggattctgaaaaaccattcctgcggtctttcttatctccagccattctctttgctcttttgtgtcatgcccgttaatccatacggttccttctgttggctgaagcaatgcattcagatgtctggcaagtgttgatttgcctgaaccgttatgtcccagtaaaacaacaaaacttcctgcctctatatccacagaaatatcccgcagaactctgttcttagactcaatattgccattctcatccttctgcacataatcgtggatcagatgcagagcccggataatcttttccatgtttactcctcctgtaaaatctctgtccttttcagtcatttggtaattcttcataagcgcctcgtacagttgacgccttttgcccatacaccccaatgcatgtaaaaaacttccaaataaccaaaaagaaaagaggccctgtaagatatgcctaagcatatcttacaacagccccttcaatatgtctatcagaatttaagtcaaaccgaattaaactaattcaatgataacttccatagctgcatcgcctttacgttcaccgatcttgacgattcttgtataaccaccgttacgtgtagcatacttctcagctaattcaccaaataacttatcctgaagattgatttcttttgtattggcttttctcttagcagcagctgcaggaatgtcttttcttgtgtaaagaacctttgccatctgctttctagcatgtaaacgggatggtctgtcttttttgattgtcttttcaactgtatcaaaaacaactttgccatcttcttttactctcttgccgttagcgtccttacgaacaaccttagcctgaacagttacttcatcaaagttatctttttctttaacaccaagtgcaattaagccttcggcaatctttctgatttcttttgcttttgcttcagtagtcttaatcttgccgtagcataacagatcagttacctgatttctgagcaaagctttacgctgactggaagttcttccaagttttctatagcctgccattgtatatcctccttaaaaatcgataaattctaacggagcgaattattcgtcactcggattcagctgaagtccaagttctttcagtttggcaagaacttcttcaagtgatttacgtccaagatttcttaccttcatcatatcttcagctgttctgtttgttaactcctcaaccgtattgataccagcacgtttcaggcagttatatgaacgaacggataattcaagctcatcaatattcatttcaagaactttttctttctcattgtcttctttttctaccataacttctgctgtcttggcattttcagaaagatcaatgaaaagattcagatggtcgctcaacacttttgcagcaagactgacagcctcgtctggtccaagtgtaccatttgtatagacatcaagagtgagtttgtcataatctgtcacctgacctacacgtgtattctcaacagtcatattgacacgctcaacaggtgtatagatagaatctacagcaagtactccgattggtaaatcatcgctcttattcttatctgagctgacataacctctgccctttgtaattgtaagctccatgtagagtttgcaatcagcaccgccacttaatgtagcgatcacctgatccggattcatgatttcgatatcctgatcaacctgaatatcggccgctgtaacgacgccttcgccttcgtattcaatataagctaattttggctcattggtcagacttgtattcttgattgccagacttttgatgttcatgataatctcagtaacgtcttccttaacgccaggaattgcactgaattcatggacaacaccgtcaatctttacatgactgacagcagcacctggaagagaggaaagcataattcttcttaaggaattaccaagagtaattccgtagcctctctctaaaggctcaactacaaaacgtccgtatttgttatcttctgatatctctgcaatctctattttcggtttttcaaaataaaacactaaattggccctcctttatgggtttgaaactaattgagggtagtccatcagcctgtcaaacaagctaaaaattattatttagaatacaactcaacgataagcatttcgtcaacaggaacatcaatctgctctcttaatggaagagctttaacttcacctttcaggttttcctgatctgcttcaagccattcaggaaccattctgccgccagccatctcaaggatgtctttatatctctgtgaagttttgaatttttctctgatttcaacaacatcgccaggttttacctgataagaaggaatattaacaagcttgccatttacggaaacatgtttgtgatctacgatctgtcttgcttctttacgtgttcttgcaaaaccaagtctgaaaataatattatcaagacggcattcaagcataaccatcaggttttcacctgtctggcctttcatctggcttgctttagcaaagtagtttctgaaaggtttttccagaacaccatagatgaatttagctttctgtttttctcttaactgattaccgtactcggatttctttctattgcctctaatagactgtctgttggacttcttatctacaccaaggtagagtgggtcaagtccaaggcttctacatctttttaaaactggaaccatttctctagccatatctattacaccctcctattagactcttctgcgttttggcggacggcatccgttatgaggaacaggtgttacgtctctgatgcttgtaacttcaataccgcatgcctgtaatgcacggattgcggcttcacgacctgaaccaggacccttaaccataacttctactgacttcagaccatgaataagtgcagcctttgcagctgtctctgctgccatctgtgcagcataaggagttgacttacggctgcctctgaagccaagaccaccagcacttgcccatgataaagcattgccttctgtatctgtaagtgtaacaattgtattattaaaagatgactgaatatgtgcctgaccgcgttcaacgttttttctgacacgcttctttgtaactttctttgtcactttcttagccattgatcattaacctcctgaattacttcttcttgtttgctactgtcttcttaggacccttacgagttcttgcgtttgtttttgtcttctgaccacgaactggaagaccttttctgtgacggatgcctctgtagcaaccaatttcctgtaatctcttgatattaatagcgatctctctacgaagatcaccttcgattaagatgctgtctgcatcgattgcatcacggattttaccaacttcttcatctgttaagtctctaacacgagtgtctggattaacgccagcttcctttaaaaggcgatttgaagttgctctaccgataccatatacataagtaaggccgatttcaattcgtttatctcttggtaagtcaacaccactgatacgagccatgtaattacacctccgatagttgtcctaaacaggggcaaaactgtaacacacatattgctatgtgtggtgaaatgcttacagcgcctcccactgttcttattattcattcttgttctttatattagtaaataatatcgtcattttgacggtcatgacgatacatgatctgttatgatcaattatatataatagtgaggcttacacccatccaggtgtatcccactgcagccgcataacttcgattgcccggaataaggcaattctgttactacagacagaaatacagagtaaaattaaccctgtctctgtttgtgtttaggattttcgcagataattctgacgcttccttttctcttgataaccttgcatttctcgcagataggctttacagaagatcttaccttcattataaatctctcctttcatagaatgtacatccacatacgcaaccccgttcctcttagaacggtggccatgtaccggctgctcattccattttagaacgctcgccgactattatatcatatgaaaatatagaaatcaagcagtttttttaattttacttatctctccaaataattctacccttagtcagatcatatggagaaagttcaatcgttaccttatctcctggtaagattttaataaagttcattctgagcttgccgctgatatgtgccagtacaacatgtttgttctcaagttcaactttgaacatggcatttggcagtttctcaacaactacgccttcaacttcgatgacatctgcttttgacatttatttgtcctcctgattttctttcctgttttcaaaggtttgaataatttttactatatctgcatcggtaatctctgcatccatacggatgttaatcttctgcaggtgcagaggattttttcttttgggttttgaaaccgtccactttgtaccatctgcagcatcaagattcctgtccccgactgctgtgacaatataaagtctgttctgatctcttccctgtctggatctcaccagctgaccaatcggatatttatctgataacgctttcttcttcatcatcatcaccctttacctaagagttaatatctcacagccatcttttgttacaagaattgtattctcataatgtgcagataaggatccgtcatctgttacaaccgtccagtcatcatcttcataggcaacttcccatgtaccggcattcaccattggttcaatggccaatgtcatacctgccattaaacggatacctcttccttttgtacggaaattcggtatctccggatcttcatggagatgtgtgccaatgccatgacctacaaggtcacgaacaactgaaaagccgtttccttcaacataatcctgaatagcagcggaaatctcatgtagatgattcccttctttagcaaaactgatacctttaaaaaagctttccctggttacatcaatgagtctctgtgcttctgcactgatctctccgactccccatgttctggctgcatctgaatgatagcctttgtaaatgagccctgcatccagactgacgatatctccttctttcaggactctcttatcagtagggattccgtgaacaacttcatcattgatggatacacagatagaagcaggaaatccattataattcttgaaattcggtacgcaaccgaaatcacggataatctcttctcctaatctgtctatatcaagtgttgtcattcccggctttaatgctttgtgcagttcctcatgggtaatggccagcaatcttcccgcttcacgcataagtgcaatctgcttctcagactttactgttactgccatattattctcccagaatcttcatgatatcatcgaagactttgtccattgactgtgtaccgtctacttcaaccagtacttttctttctgtatagaagtcaatcaatggctgtgtctgagtatgataaacatccagacgtttcttaactgtttccggtttgtcatcatctctgagaatgagcgattcaccgcacacatcacatttgccttcaacctttgtaggattgaacagcacatgataagttgctccacatccaacacaagcacggcgaccggacattctattgattatattctcatctggaacgtcgatatcaatcgcataatccagcttttgttcaatagcattaagggcattttccagtgcttccgcctgaggaattgttcttgggaaaccatccagaatatagcctttttcacagtcagcttgttgaattctatcaacgacgagatcgcagaccagttcgtccggtacaagaaggcccttatccatgtattctttggcttttgcgcccagttctgtaccattcttaatgttggctctgaagatatctccggttgatatatgtgggattccgcatttttcggcaatcattttagcctgagtacccttaccggcacccggtgctccaagcataattattttcataattatcctccaatcatatgtccaacaattgattaatagtaactttataacagcaagtattcagccttcgataaatcgaacgctgaatctttgcattgttatacaacttttgtaaaatcgaacttacttgctgaaaataccagtcaagtgtctctgttcaacttttgaatcgatctgtctgattgtttcgataataacaccaacaataatgatcaatgatgtaccaccaaaggatacatcggcaccgaataaacctgaaaatacaataggtaccagtgcaacaatcagaagaccaacagcgccgatgacaatggtgctgtttgatacagactgcagatattctgctgtctgtttgccaggtctgtgacccggaataaaactgcctctttcctttagacgttccgatacttcaacagggttgaatgtaatggatgtatagaaataagcaaaagcaacaaccagtacaatatagatgataacaccaatactgtaaaccggcgccgacatattgaaccagttattctgattcagaactttgataatctcacctaaaataccacttggtgtcttaccagcaaatgttgtgaccagactcggcagtgacattaatgaaccggcaaagataacaggaataacgtttgctgaattcactttgaaaggaatataatcgccaacgcttcccacgctgcgtctgccctgaacctttgatgagttctgtacaggaatcttgatataagcgtcctgaagataaacaacaaagacaaacatgaacagaataacagcaacaataatgatgagagcaagacccgctttcacgatgttcttaccactcataaatgtatcatacagtgttttgaaatcctgcggcagtcttgaaatgatgttgaataaaaggatcatggagacaccattgccgacgccatgtttagtgatctcttcaccgagataaatcagtacgcaagcacctgtaacaagtgcaacgactacaataaccaggcccagtgcattcttagatgccagatatccaccacggtagaatccgatacccatagcaagagactggatggcagctaatacaatagaaagatagaaagtatactctttcatcttctcacgtccatcctgatccttctgcatctcttcgagagaaggaataatgatggtcatcagctgcataatgattgatgatgtgatgtaaggtgtaatactcagtgcaaatactgacatctggctgaatgaaccacctgtcatcatatcaaaaagatccattgctccatttgactggttgccaaaccatgaagcaaagacatcccggcttacgccaggaattggtatctgagcaccaaacctgacgacaaccaaaatcaaaaatgtaaataaaagtcttttctgaatctcagggacctttaatatatttttgagacttgcaccatttgaattggtattagccattagatcacctctgtagttccaccaagagcctgaatcttttctgcagcactcgcactgaatgcgtttgctttaactgttaatttcttcgtaagctcaccgttgccaaggatcttaacgccatctttagggtttttgataacgccgttttcaactaatgtttcgattgtaacaacagcaccatcttcgaatctgtttaattctgtgatattgatgcttacgatatcttttgtatttctgtttgtgaagcctctcttaggaagtcttctgtataaaggcatctggccaccttcaaaacctggtcttggagcgccggaacgtgccttctgacctttgtgacccttacctgctgttttgccattgcctgaaccatgaccacggcctactctgaagttagcgctgtgtgtggaacctgcagctggttttaattctgataagttcattacgtgcacctccttgcaatctgaattagatttcttctacttttactaaatgcttaacctgtgcaaccatgcctctagttgctgcattatctggtaattcaactgttttgttcagcttcttaagaccaagagcttcaacagtctttttatgtttaggaattgcaccaattgtagatttaactaaagtaatctttaatttctctgccattacaaacgcctccttaacctaaaatctcttcgatggatttgccgcgcttcttagcaacttcttctggagttacaagattgctgagaccctcgattgtagcaagaacaacgttctgtttgttgttggaaccaagagattttgtacggatgttcttgtagccggcaagttccagcacgttacgtgcaggaccacctgcgatgataccagtaccctgaggagctctcttcaggagaacggaagcaccaccgaactttcctaaattatcatgtgtaatacttaagttctcatcaagtggaacttcgattaatttcttgattgcatcttcttttcctttgcggattgcttcaggaatttcagttgctttacctaaaccagcgccaacatgtccattgccgtcaccgacaactactaaagctgcaaatctcatgttacgtccaccttttacaactttagttacacgtttaattgacactactttttctgttaattctaattgactagcatcaataattgtacgtttcatgtgttctcctccctgtgctagaatttaagaccagcttctctagctgcatcagctaaagcctgaatcttaccctgataaataaatccgcctctatcgaagacaacttctgtaatacctttttcaagagcctttttagcaacagcagtacctacagctgcagcagctgcaacattgtctgtatactgtaattcgtctttgattgccttttccattgtggaagcagctacaagtgtattaccaacagtatcgtcgataatctgagcgtatatatgattattacttctaaacacagataaacgtgggcgctgtgcagtgcctactaaatgatgacgcagtcttctatgttttttaacacgaatctcacttctggattgtttgttaaccattctattcactctcctttaattatttcttaccagtcttaccaaccttacgtctgattacttcatcagcatacttgatacctttgcccttatatggttcaggtcttctcttgtctctgatttcagcagcgtactggccaactttttctttgtcgatacctgatacaatgataatgttctgaccttcaagagttgttgtaacaccttccggatcagtcatttctacaggatgtgaataacctaatgataatacaagagtcttaccctgtttctgagctctgtaacctacaccgtttacttcaagtttctttgtgtaaccttcagtaacaccaacaaccatgttgtggatcagtgttctggttaatccgtgtaatgatttcatcttctttaaatcgtttggtcttgtaactacaacgtgaccatcttcgattttaatctccatttcaggtgctaaagctctaacaagagttcctttaggaccttttacagtcacattattattttctgctatctcaacagtaacgcctgcaggaatagcgattggcattcttccgattcgtgacatgcccgtacctccttacttaaattgcaggagcattccgctccgttttcagtagatttgtaaatttgacttatatattatactagaatataatatcgatttcaagctttaagcgattcttaaagcaaattgcattgcacacaggccgaataagcagttttgcttatccgcatccctttgccctatgctctgctattttataaattaccaaacaaatgctaaaacttcgccgccaacgttcatggctcttgcttctttatctgtaacgatacctttgtttgttgaaataatagcgatacctaaaccgccaagtaccttaggcatattttctacacctgcgtacacacgaagaccaggtttggagattctcttaagtccagagataaccttctggttcttatcagcaccatatttcagtgtgatcttaattgttttaacaacgccgtcttctacgatttcgtatgctttgatataaccttcatctaaaaggattcttgcgatctctgttttgatctttgatgcaggaacatcaactgtatcatgttttgcagtgttcgcattacggattcttgtcagcatatctgcgattggatctgtcattctaaggttcctcccttcctaatcttaccagcttgctttcttaacacccggaatttcgcccttgtaagctaattcacggaaacaaattctgcagataccatactttcttaagtaagcgtgtggacgtccgcaaattctgcaacgattgtattctcttgtggagaatttaggtttgcgctgctgtttgattttcattgctgtcttagccatgaaacactacctccttattttacgtatggcataccgaataaacggattaattcacgagcttcttcatcagtgttggctgttgtaacgaagataacatccatacctctgactttgtctaccttatcgtattcgatttcagggaagatcagctgctctttgataccaagggcatagttacctctgccatcgaaggagtttgcgctgacacctctgaagtcacgtactcgtggcagtgccaggttgatcagacgatctgcgaaatcatacattttttcgcctcttaatgttactttacaaccgattggaaggccttctctgatcttgaagttagcgatagattttttagcctttgtgacaacagctttctgacctgcgatgatctcaagatctttaactgctgaatccaatactttggagttgtcttttgcttcgccaacgcccatgttgataacgatcttattgagctttggaacctgcatgatattcttataaccaaacttttcgatcattgctggaacgatctcattgttgtatttttcctgtaatctgttcaccgtcatgtcctcctttcgtcaattaatcaattactactgcagcctgatctttaacctttgctgcacgaacttttttaccgtcaacgatctgatactgaattcttgccggcttaccattgtaaaggtacataacgtttgaagcatcgataggaccttctgtatggatgataccgccctgctgattagccatagaaggttttgtatgtttggtgatcatgttaagaccttcaacgtatacaacgccttttttatggttaatagcaataattttaccggacttgcctttatctttaccagcgataatctgtaccatatcgccttttttaattctcattgttgctgacacggtcgccacctccttacagaacttctggtgccagtgaaacgatcttcatgaactgtttttcacgtaactctcttgctactggtccaaagatacgtgtacctcttggatttccgtcatctttgatgataacagcagcattttcgtcgaatctgatatatgaaccatctttacggcgagcgcccttaactgtacgaacaacaacagcttttacaacatcgccttttttaacaactccgcctggtgttgcatctttaacagtagcaacaatcacatcaccaatgttggcatatcttcttgttgaaccacccataacacggatacagagcagttcttttgcgcctgtattatcagcaacacgaagtcttgtctcctgttgaatcatgactttacctcctgaattctactgaactaattatttagctttttcgacaatttcaacaagtctccatctcttatctttagataaaggtcttgtttccattactttaactctgtcaccgatgttgcattcgttgttttcatcgtgagcttttaatttgtatgttctatctacgatcttcttgtacagaggatgttttacacggtcttcaatggcaacaacaattgttttgtccattttgttgctgacaactctacctactcttgtctttctaagatttctttcttccacgacaatagtctcctttctccgccaaattattcagcagcgttagccttttcagtgatcactgtctgaattctggcaatatttttgcgaacttctttgattctgcttgtattctctaactggttagtagcattctggaatctcagattgaagagttccttcttagcttctactaaagcctgagctaattcgtcaacagactttgtatttaaatcttttacatattcattagttttcactgttatcaccgccttctaaatctgcgcgagaaacgattttgcatttaacagggagcttatgagtagccagacgaagagcttctttagcaacttcttcaggaacgcctgcgatttcgaacattacgcgacctggcttaacaactgctacccagtattccagtgtacctttaccggaacccatacgtgtttcagctggttttgtagttacaggtttatcagggaaaattttaatccaaactttaccaccacgtttgatgtaacgtgtcatggcaacacgggctgcctcgatctggttggatttgatccaagcaggttccattgcaacgataccgtattcaccataagaaattttattaccacgctgtgcttttccggccatagagccacggaactgcttacgacgttttactctttttggcattaacattatttatcgctcccttccttattgccctttactggaagaacttcgccatggtagatccatgtcttaacaccaactttaccgtaagttgtgttagcttctgcgaagccataatcgatgtctgctcttaatgtctgaagtggaatagtaccttcgctgtagaactctgtacgagccatatcagcaccgccaagacgaccgcttacgcttgtcttaatacctttaacgccgcctcttgaacgcattgtcttctgcatggaagatttcattgcacgtctgaaagagatacggttttcaagctgtgcagcaatgttttctgcaacgagctgagcgtcacattcaggcagtttaacttctttgatatcaattaaaagctttttgtttgtgaactgtttcagttctgctttaactttttcgatttcagaaccctgacgtccgataacaacgcccggtttagctgtatatacgattacttttactctgtcagatgctctttcgatttcaatcttggaaacaccggcactgtataatctcttcttcaggtatgttctgatcttgtggtcttcgatcaggttgtcagcaaaatcagcatcagcataccatctggaattccaatccttaataacaccgactctgaggccgtgaggattaactttctgtcccattgcttacttcctccttatctttcattcagcacgattgtgatatggctcattctcttttcgattctgtaagctctgccctgtgctctaggctgtactctcttcatgattgggccattgcttgcgtagcactcttcgataaagagtttgcttctgtccataccgttgttgttttctgcgtttgcaattgctgattttaataatttatcgataactgttgaagcatatcttgggttgtatgctaaaattgctaatgctgtttctacatccttgcctctgattgcgtcaagaacgaaacaagctttctgaacaggaattcttgcaaaagacagctttgcgcttggtcttgtatccttattgctgtttctttctctcttgatctgggatctatgtcctttagccatggatgaaagcctcctttcaaactataatcttaacgtcttgatttcttttcgtctttaccatgtcctctgtatgttcttgttgctacaaattcacctaatttgtgaccaaccatatcttctgtgatatatactggaacatgttttctgccatcgtgtactgcgattgtatgtgaaaccatctgtgggaaaatagttgaacggcgtgaccatgtcttgataactgacttatcgcctgctgcgttcatagcgtctacttttttaagtaagctctcatctgcaaatggtccttttttaagtgatctggccataatctaacctccttatttaatcatgcttccgtcgcgtcttcttacgatcatcttgttagaatgtttattcttcttacgagtcttataacccagagctggtttaccccatggagtcataggaccagaacgaccgataggcgcacgaccttcaccaccaccatgtggatggtcattagggttcattacggaaccacgaacagtaggtctgatacccatgtgacgcttacgtcctgctttaccgatgttgatcagttcgtgatcaatgttaccaacctgtccaacagtagctcttgcctggataggaacaagtctcatttcacctgatggcagtcttaatgtagcgtatttgccttctttagccatcagctgagcagcgttaccagcggaacgaacaagctgtccgcccttacctgggtgaagctcaacgttgtgtaccattgtacctacaggaatctgagccagtggtaagcagttaccaagcttgatttctgcttcaggtccgttcataagaactgcgccaacctgtaagccgttaggagcgatgatatatgctttctgaccatctgcatagcagatcagagcgatatttgctgttctgtttggatcgtattcgatagatttaacagttgcaggaataccatctttatatctcttaaaatcaatgattctgtattttctcttagcaccgccgccgcgatgtcttactgtaattttaccctgagcattacgaccagctttgctgttcttggatactgtaagggacttctctggtgttgactttgtgatctcagagaaatcggaaccggtcatatgtcttctggaaggtgtatatgggttatatgttctgatacccatttcgttcactcctttcaagtgtctgatttattgtcatgcttatttgcatataattcgttgtgccttacggcctgatcttaaaggccttcgaagatttcgatgtcagcactttcagctgtcagtttaacgatagctttctttgtctttgctgtcttaccaaatgtcataccacgtctctttgtcttaccatcgtagttcatagtattaacacttgctacctttgttccagcgaacattttttcaacagcttctttaacctgagactttgttgcatccggatgaaccaggaatgtatacttcttatcagccattgcattcatactcttttcagtgatgactggtttgaggatgacatcataatattttaaatctgccattatgcataaacctcctgaattgttgcaactgcatcctgtgtcagtacaagtgtatcgtacttcagaatgtcatatacgttaatagtatttgtaagagcagtctttactgtaggaacgttgttagcggatttgataacgttgtcgttcttttcatttaaaacaaccagagctttttcagccttcaagttattcataactgctacgaatttctttgttttgatttcgtcaagttcgaaagaatcaagaacgataagcttgctttcattaacctttgttgttaatgcagacttaatagccagtcttctttctttcttgtttaatttgattgagtaatctcttggctttggagcgaatactacgccaccgcctgtccactgtggagatcttgttgaaccctgtcttgcatgacctgttcctttctgtctccatggctttctgccgccgccgcttacttcagaacgtgtctttgcgctctgtgttccctgacgggatgctgcaagctgagcaactactgccttgtgcatgagattttcattaacttctacaccaaatacggcatcattcagttcgatttctccaacctgattaccttcaatattgtaaacagataactttgccatctgtaatgtcctcctttctcaaaccaattaagcttttactgattctttcagcattactaaagatttctttggtccaggtactgcgcccttaaccaggataaggttcttctcagcgtcaacgcttacaacctcaaggttctgaactgtaactcttactgcacccatgtggcctggcatatgtttgcccttgaatacacggcctggagttgttgctgatccgttagaacctgcatgtctgtgatatttggaaccatgagccataggtcctctggactgtccatgtctcttgattgcaccctggaagcctttaccttttgatttagctgttgcatctactttgtcgccagcagcgaatacgtctgctttgatttcctgacctaaagtatagctttcagcatcttccagtctgaattccttaagaaatctcttagctgttacgccagcttttgcaaaatggcctttctttggtttgttgaccagtttttctctgatgtcgccaaaaccaacctggactgcactgtaaccatcattctcaactgtcttaacctgtgttactacacaagggccagcctgaagaactgttactggtgttaaaaccccgtcttcactgaagacctgagtcatgccaactttcgttgttaaaattgctttcttcattaagaatgcacctcctgtttaaatctacagcggaacgctattgcgttcatcctagacgcattgagtacatcttcgactttcgtctgaatctatatcaacccaatacctaaggattgttttcaatgttattattttgttttcatcttgatgtcgatgtaaacgccagcaggcatttccagtctggataatgcatcaactgttttctgatttggagcgatgatatcaatcagtctcttatgtgtacgctgttcaaactgttctctggaatctttgtatttgtgaaccgctcttaagattgtaacaacttccttctttgttggaagaggaactggaccgctcaccttagatcctgttttctttacagtttcgataattttaccagcgctctgatcgattaatttgtgatcatacgctttgagtgtaattctcattacttgacttgccataaaaaaagccgcctccttttcgcactattcattaagtacgacaagcggtgactgtacactttcccgtgtgtttcctgatgtcaacacacacctattctgtcttacattcttctatagacagaccttgttaactttgtacagtgacttgtcgccagttttcaaacttgacattcgctccacggaacacctgcgcaaccctcgcagcaacctcacgcttcatagctatcaatgtcacaagcttctctagtatataccataaaatataggaatgcaagtgttttttgaaaaaaactcaaactttttatgtattactctattgcaaagttaaattccacccctctgtggaatttaatcctgcaaatcaccctgctttcaaatgtggaatttaaacagcctgagaaaggaattattgactggacaatgtatttggagaaaacaaaaaagaaaccaactatgaagcagatatggtttgaatcacagagagaaccggagaattacccagtcgataaagagcttttccttcactacatggatttatggggagtagaaatagaaggttatcataaagaagagggctgatttcgaaagcattttgtatttagaatagtttttatgaattatttggttttcaatgcttcgtattcttgcggggcattcccttaccacaagaaaaataaactgaaaatatacaaacaaaaaattgagaggaaaggagattgatgaaagatgagagatttaatgttacagttttcaaataacatttttatagaaatcctgatgctggctatctgcgcggatacactgctgggtgttcttcgggccatcaagtttcgacagttcaacagttctgtgggtatcgacggagctatcagaaaggtggccatggttgtcagtgtagggattttgatgctggcggatttactgattcatgtgaatcttctggcttttatacctgaggaatatgtgcatgatctgggtgttcagaaacttgggatgtgtgaattcttctgtctgctgtttacagcctgtgaatgtttatctgtattgaaaaacatggttctgtgcggcctgccggtgccgaagaaggtcgaaagctggctgagagattttcttgccaatatgacatcagagctgccaatggacaatggtataagtgataagatatatgaagcaggcgaggcgaacaccaatgaagcgaatactaataatagtgtgctgaataaaatgaaggcaggaggtggagaaaatgtcagaaaataaaaagctgttagtcgtcattgacccgggacatacggggaatacctataatgccggagccgtgaaaggttattatgaaagcaaggctgtttatgatttgagtctttatgaaaagacagccctggaaaagagagggattgatgttatcctgacaagagaacggaatcaggacccggggctttatgagcgcggacagatggcagtgaaaaaggggaacggatatgccaatgttttgtttgagagcaaccatacggatgcattcaatggaaaagcctgcggtgtgacggtggttcgttcggcacatcttccgggatcagaaaaactggcagagaaaatgatcgatgccattgtcaaagtcatgaagccatccacaggcattacttataacaggggagtcgtgacaaagacccagagcaacggtgcagactggtatggggttatccgcggggcagtatctggagcagcttcacagggacaggcgaaaaatggcccggttcgttatgattacattgttgagcatggctttcatgataatcccaaggaatgtattttcctgtcgaaacaggaaaacttaaaagctatagcggaggccaaggcggctgcaatagcagaatattttggtattgggaataaaagccagccagcaaatcaaagcgggcagagcagtcagaataaccggaataatgacagtcatcagacaaatcaaaatacttcgacagatagtacgacattaaataaaaagacagcatatctggtaagagtttctgttgacgatctgaacatccggcaggcacctacaatttattcaaaggctgtgggatttacaggcaagggggtatttaccattacagaagaagcaacgggaattgtcaatgcagccggagagaaaagccgatggggaaaactgaaatcagggcagggatggatatgccttgattatgcagagaaagtggcttgaaaagtttgaaaagagttttaaccagttcaagatcaaggaatgagatgctataatgaaagagactgggaggtatatttgacaaatggagatgaaaaaaataagaatttgaaatattttcagggtgcaatagaaaaagatatacttatggaaaaattaaaggaatagcatgtagaattatcagaggacgaactgtgaaaggatacataaatgcttgcaattagaattattattgaagttataatttttatctatatgatgagcctgagtattaggataagaaaacagaagataaaaaagactcgacggattaagataataagaattttttggatgattatgtttgtgatagttgttccctatttatcatatgttcccatagagaattattttattacgtttaaatcgccagaaaaagcaatggcatatgaagaatggttgatgcccaaaagagagatagacgatattatagatggtaaggattcatgtatggtaatagaaaaaagaaagaagaatgggatgataagctatgaaacggaatatttgaggaaagtacaaggtgggtataagtttttgggcacattggatgtgaaggcagaaaatatagcaggcacagcgattatagtatggcatattaaaggaacagaagattattatttatcaggagtgaaaatgtcagaaaatgcagcggacagtgtgaatatcagagatagtctgggaacgaaatttgttcaaaaagtttcagatggaggacattataaggagatagtgatatatgattatgaatattatggatatatgtatgatattacggaagattatgaaatatatcttgatggacagacacatatattgccatctgaaagtaaatattctgttcggtgatttgaatattgtctatgaaagctgttagtaattcagtgcatgtattgggaaagtaggacaagattttaatttaagtatacgcagttcagctattttttaaagacaattttgaaggtaataaatgcacaaatttgaacaaaaggggcgtccgctttacgattttttaatcgttaaagcgacgccttatttacgcgagcaacgagccagggttcgtgcttgcacgagactttggcgttgctaagcgccagtggcgcttgtttagcaacgaccgaaacggagtgtagaggccgcgataacttgagaaactcgcggagcgtgtttctcatagtttgatatacatgggccgcacgcttttgggttattggtgcagccctttttttagtttagcgggctgcaaaagattcgcagtcggtgccctcttttgtcttaggggaacattcgcaggcgccgatgctgacacagtttaaggtacagtattccacattacctgcatgatgtttacaatcatgaacgccacatttaattgaattgtttacttccattttgataatctcctttcaattgcgaaaaaactgagtccgttcaacatgtaatcgtgagaaatatttttcacttgatactgcgaacggaaaagctaacatattgacgggtgacagcattagtttgcaccgaaatttatgaaatatgtataaaagactattttttttcaaaaaatttgttatactgataatatacgttcaaaataagagaagacaggagggatctttatgcagcatgaggtaacggatgttcagaagttgttggataagcagggatacgttgtaacgcctggatgggcgagacgaccggtctggcagtataatcgcgagaatattgcagccccttcttttcgcattaaggaatgggattattatcttgcgggcaatgaacattatgccgttgcatttaccctgtcggatctgggatatgcgggattaattagtgtttctttgattgatcttgtggaacgaaaggaacatactgagaccatattgacggcaatgcctatgggacgattgggactggggaggacatcggacgatggcaatgcggatttcagaaatggtcggattcatcttcgttatacggtgaagccgcatagaagaagaattcagtgtgttttccgtgattttcaggatggtaagacattgacggcggatcttctgatgaagcagccggagatggacagcatctgtattgcaacaccgtggaaggagaatcagaaggctttttattacaatcagaaggtgaattgtatgccggtcaagggcaaagtgaactttgacgggcgcgattatatttttgatgggagaaaagatatggctgtccttgactggggacgcggtgtgtggacttatgacaatatctggcgttggggaacctgcagtacaaggctgaacggtgtacctttcggtttcaatctcggctatggattcagtgatcggagcagtgccactgagaatgtgattttctatgatggccgtgcccataagcttcaggaagttgtttttatgatcggacaggatgataagggcaattttaattacatggatccgtggacgatttcatccagtgatggtcggtttgaggggatttttgagccgatcctggacagaaaagcaaagattgatatgaaagtaattgccagcgatcagcatcaggtgtttgggcatctgacggggacggcagttctggatgacggaaccgaactcaagatgcgggatgtcattgcagccatagaagttgttcataatcgctattaagacttgtgggagaagtgttggctgatggaagagaggaacattagtcatgtgacagaagcagctgttggcggagctgcagtaattaggaggggtttacatgagaggagcagttgaacttaggacagacggatgtacagatttacagatggacagcaataagcaatatattgtgaccaagtggtatggcagcagtctggctatttttgaagaagccgcttttcagaaatatctcaggagactggatacggatttcaaggataatggtcatggacagagtgtgatccgctattttctgtcagcggccgttaccatgatgacagaagaatcagatggatggcgtattccaccggagcttctgacgtgcattgagaaagacggggaaaggctggaatactgggaatgtgagatcaacagcagttatcaggacagtttgcctgtttttgtagtggcagcatccgggaatatggacagtgccattgagatgacgaaggagcggcatgccgcataaacggcttatccggtgaatattattatgtaactgttcagagtcaagtaaaatttcaaaaaacttcataaataagcacgaatacataatgaatatacaggcagggctgacaggcaatagaaggaggtgcggtgcatgggtggttatctgaatcctgggaatgagaagtttggagaagctttgaattctcagatttatgtggataaaacggggttaattgaatataccaatagggtcatgtacagcaatcagaaatatgtgtgtgtcagccggcctcgacgctttggcaagtcgatggcggccaatatgttggcggcctattacagccgggggtgtgattcgcgggaattatttcagggattgaagatttccaaagcggatgcctgcgagaagaaattaaatcaatataatacaatatttctgaatatgcaggaattcctcagtcagacatcaagcatggatgagatgctgcgtttagtaaaaaaatcagttttatgggatttgttttttgaatatccggatattaattattttgataaagaaaattttagcagggcaatgcaggatgtttaccagcagacgaaatgtccgtttgtgattattattgatgaatgggactgcattttcagggaatatcgcgagaaccatgaagcgcaggaacagtatcttgatttcctgagggatttcctgaaggacaaggcgtatattcatcttgcctacatgaccggaatcttgccgattaagaaatatggcacacattcagcacttaatatgtttgatgagttttctatgacgaatccgggacccttggcagaatttgtcggttttacggaagaggaagttgccgctttatgtaagcaatatggaagaaatttgtctgaactgaaagaatggtatgacggttatcattttgagaaggccagatccatctacagtccgcgctccgtggtgacggctattttaaccggtatttgcgattcttactggaatcggacggagacatttgaagctcttcggttctatattgatatgaactttgaaggactgaaggatgatgttttgagtatgttggcgggagagagaattccggttaatacaggaacattttccaatgatatgacgacattctacagtgaggatgatgttttgacgttgttgatccatcttggctatttgggatatgatttttcatacaaggaagttttcattccaaacagtgaagtgcggggcgaatacatcaatgccgttgctgcatcccagtggggtgaggtttccaaggcattaaagaattcttcagatacgcttcaggctatctggcagaaatatcctgagaaagtcgctgaagggattgaacaggcgcactttgaaacggcacatattcagtacaacgatgaaaatgcattgagttataccatttcacttgctttatatgcagcaagaaatttttacactgtatatcgtgaactgcccacaggaaaagggttggctgacatggttttcctgcctcgcagacagttcccggataaaccggcattggtggttgaactgaaatggaatcacagtgccgagggtgcccttgctcagattaaagaaaaacaatactgtaagagcctcgaagattataggggaaatattctgctggtgggtgtcaactatgataaagtgacgcgagaacatacctgtgtgatagaggaagcggagaaataaataataaattctatgtaagaggatgtcttagggcatcctttttttgtctatagttatactaaattttctttcagaattctttcactccatataactttcttacaataccccgacttttcctgttttcggatttttttgtgctatgataggggcaccaaagagaacagggggcgatagcttgaaaaatatattggaatatcttgaacattcagtcggtcggcggcctgagaaaacagcctgtgccgatacagatacatcaatgacctggcgtcagcttcgagaggcatcagcgcggatcggcagtttactgctgaagcaccggttgacacaccgtccggtggctgtttatatggaaaaaacaccggcctgtctggcggcaatgctgggaacggtttacggcggtgatttctatacagtgattgacaccaaaatgccctgggacagaatccgcaagattttcagtgtgctgaaaccggcggcgattattaccgacagggaccatgaagagacagtcagggaagcccttgcctccgaaagaaaagacagtccgaagatccttctttatgagaaggccatgtatgtgcctgaggatcgggaagggctggcaaagattcggagaaaagcagtggatacggatctggtgtataccctttttacatccggttccacaggcatgccgaagggtgttgccgtttcccatcgaaatgtgatggcttatgcggaatgggtgaaaacgacatttgatatcaatgaagcgacggttttcggcagccagacacctttttatttcagtatgtcggtgctggatatttatacaactctggcagcaggcgcagaacttcagattctgccgaagcaattatttgcttttccggtgcgtctgttggagtatatgaacagtcgaaaagtgaataccatttactgggtgccgacggctttgtccatagtggctaattggaaagtgctggattatgtgtcccttccgtatatggagaaggttcttttcgccggtgaggtgatgccggtgaaacagctgaattactggcggagaaaaatgccggagctgctgtatgccaatctgtatgggccgacagaagtaacggatatctgtgcttattacattgtggaccgggattttgcggatagtgaaacactgcctattggacgtgcctgcgacaactgtgacctgatcatccttcgtgaggatggtacggaagcggcaccgggagaaatcggcgaactgtgtgtcagaggctcttttgtagccggcggatattatggagatccggacaaaacggatgctgcttttatccagaacccgctgaacccatggtatccggagaagatatataaaaccggtgatctggtccgttataatgaccgcggcgagctgctgtatctgggacgcagagattttcagattaagcatatgggataccgtatcgagttaggtgaagttgaagccgccgcaggtgcggcctccgatgtcaagagctgtgtcagtatttacgatgaagtgcatgacagaatcgtcctgttctatgagggcggtcccaaaaatgaaaatcagatgcgggttcttctggaagggaaattgccgccgtatatgcggccgggagaatgcatcagagtgaagaggatgccggaaaatgccaacggcaaaatcgacaggaaatacttgaagagctactatacagatttaatggatgggcaggccatcggttagtttatcatgtttgcaaaatcggggctttgaaagtgcgtgtctgacggacgtttcaaagcaggcacgtttgcactgcccggcactagcagcagtacataaggcactaaaagacagtgcctaagtactggctgtgtcgggagcacctgcttatgaagcgtccgtcagacatgcacttatcagaagtttattgggttttgcaaacaagatagctattgcaggaatccgatggcttgcccatcggaggttgaggggataagaagtagtgttatcaagtattagttgtggtagataatagagtgaaaatggaaggagatgctattgacatgaaagaactgttagatattttgaataaagtgaaaccgggtattgattatgtgaatgagaagcatctggtgtcggatgaactgattgattctctggatgtgatgacgattgtgacggagatctgtgacgagtttgatgtggagattctgccgacggatgtggtgccggagaattttgagtctgtggaggcgatgtggcagctgatcatgcggcttcaggaggattagtccgggatgagttatacctcttatttttatctgctgttttttctgggggtgctggtggctttatattacctgatacccttgaaaaaacggtggttggtgctgctgggcggcagttatttcttctactggatggcctccggaaaaatgattgtttttctgctgatcacaaccgtttcggtttatctgggagctctggctatggagcgggagcagcaggcctttgacagtgtgcgcaaaagtctggaaaaagaagagagaaaaaccagaaaggcagttatgatgcgccgaaagcgccatattgtgtttgccatggtgctgatcaatgtggggcttctggcctttttgaaatattatcactttttcagtgccaatatcaatgcgctgggaagccatctggagcctggttttcagctgccggcgctgaaactgttgatgcctctgggcatttctttttatacgctgtcagcggtgggctatgtgatcgatgtttaccgggggcagacagcggcggatcatcacttcggcagactggcacttttcctcagccttttcaccaatattacggaaggccctatcagccgttacgaccagcttgcagggcaggcctttgaaggacacagggctgattaccggcagtttacctttggcgcgcagctgatcctctggggacttttccagaaaatggtgctggctgaccgggcggcgctgcttgtcagtaccgttttcggcagtccgtcggattacagcggcggcattgtgatcttggcgatgttcgtctatacattgcagatttatgcggattttgccggatgcatggacatcgtgcggggcagcggggcactgtttggcattgagattgcccggaacttcaatcagccttttttctcgaagtccatcggtgaattctggcgaagatggcatatgacgctgggggcctggttcaaagattatattttctatccggtaacattgtcgaaaacaaatatgaagctgggaagatgggccaagaaacatctgagtgtccatctggggcaggcaatgccaacggcgtttgcgctgtttttcgtctggctggccaatggactctggcatggagctgcatggaaatatgtggcttacggcatgtactactatgtattgacattattcggcctttttggcaaaccggtgatacattgtttttatgaaaaaaccgggattcggaaggagagccggccatggcagctgctgctgatcatcagaacttttatactggtgaatatcggtatgctgttgtttcgggcaaacagtctgcgtatttttgcggagatgtttgaatccatgtttagaaaaacaacaggaaactggcttgagctgggattagacagacatgatctggctgtgctggcgctgggcgctttactgatgctgatggtgggtattgtcagagaaagaggtatttgtatacgtgagcgaattgcatcatggccgatggtgctcaggtggaccgtttatgcaggggtattttgtgccattgtactgcttggagcctatggcagcggatatggcgtggtggatccattgtatgctaacttctaaatccaaatgcataatgggcaggagtttcagacagcgacggaagcagaagtgggcaatatgtctaatacgcagaaataacttcgtgaatgaggagtcagtgaaatgcatatatctaatagaaaacagtttgccggacgggcattgaaaatgattgcttttgtgctgttgacggttttgctgttggtgggaatgtcgaagacgttggtgccaaggtcgaattccgccagcggcggcatgcacaattacagagccagagggttttatggggaagaaaaggattctctggatgtggtggctatcggcaacagtgatctggccagtggattttcacctatggaattgtggaaaacgcatggcatttcaggctttgcctgtggagaacccaatcagaccatcgatcagtccgtgagattgcttcaggaagtgctgacatgccagaggccaaaagttgttatcttggagacggacgcccttttccaggaaaacatggacggtcatctgacctcattggtcaagaccgcagccaattatctttttccggtattggaatatcatgatcgctggaaaagtgtgacgatctcagagctgatgggcaaaccgcagaaaccatggcatgatgcggcaaaagggtaccgctattcggatgaccgggtggcttacaaaggggtcgattatatggcgaagacggatgaccgggaagaaatagatgccatagcgctgcagagtctcaatcagtttgttgaaatctgtcagaatgcggacattcaggtgctatttgtggagatgccgtcagccaactcatggaatatggccagacatcaggcagtggcggactacgcatctgatcgaaatattccttttattgattttaatatgaaggatatgatgacaaagacgggctttgactggctgacggacagtcgtgacggcggcaatcatctgaattatagcggtgcaaagaagatcagtacatggctgggaaattatctgggatcgcagtaccagctggaagaccatagaaaagacagccgttatcagcgatggcagcaggacagtgctgattataaccgcattgtcttcggtgcggacaagcagcctgccgatgaaaattgatcataaaaattaaatggatatacagaagaaaatgaccgtttgtgaccgttcacagaatggtcattttttcgtcacaaaatccccaccaaagcatcacaaatattggttatgctataccttgagagaaaatagcatgctataaagcatgaaacagacaattacgaaacccattagatatggaaaatgctgaaattcttgggtttcgtaattgtctgttcaaatagtgagaaggaggagagaggctttgatagaagtcaaaaatcttgtgaagaaatacggcgatcatattgccgtagatcatctgagttttacagtggaagaaggccatatttacggttttctgggaccgaacggtgccggcaaatccacaacgatgaatatgattaccggttatatcggaccgacagaaggcagcattatgatcaacgggcatgatatgctggagaatccggaggaggccaagaaatgtattggttatctgccggaaatcccgcctttgtatacagatatgacaccccttgaatatctgcgttttgcggccgaattaaaaggaattgccaggaataaaaaggaagaagaggttcagaaagtgatcgcagatgccaaattggaggcggtgtcagaccgtctgatccggaatctgtccaaaggttacaaacagcgtgtaggtctggcccaggcactgcttggatatccggaggtgattattctggatgagccgacagtcggcctggatccggcgcagatcattgagatgcgcggattgatccgaagccttggcaagaaacataccgtcattctgagttcccatattttgtctgaaatcagtgcagtctgtgatgatgtgctgattttgtcccacggcaaactggtggccagtgacacaacggataatcttggcaagctcatggaagataaggtaacactgcatctgacagtcaaaggggatgaggcggctatcaaaggcgtactggatgctgttgatggtgttgaaaatattgaatatacggattctgaggaaaaaggttgtgtcgatgtgatgatccagagcgatccgaagacagaagtccgtgagatgatcttctacagactggcagctgtccagtgcccgatttatgccatgaatcagatgaagaagtcattggaggatgtctttattgaattgacagccgatggtactgaaacatctgcaaaggcacaaaacaatgaagatcctcatgaagaagattttcatgaagatgagttacatgaggaagatcatgaagaacatgaagagcacccgggagaaactgacgagacagatgaagaagacggaaaggaggcagcagaacatgacagcgatttataaaaaggaattacgttcgtattttacatccatgacgggctatatctgcatggcctttatgctggttgtaatcggtatctattttgcggtgatcaatctgtcttcaggctatccgtatttcggctacacattgtcctgcgtcattgtcttattccttttgatgacaccggtcctgacaatgcgtatccttgcggaagagaaaaaccggaagacggatcagctgcttttgacggcgcctgtttcactctggaaaattgtcattggtaaatatctggcgatggtgacagtattcggcctggccctgttgatcacctgcttttatccgttgattctcagccggttcggtaccgtttccctgccgatggcttatacagccattttgggttatttcctgtatggtgcagcctgcattgccattggcctgtttatctcatcagtaacggagagtcaggttattgcagcactgctgacattctttgtgctgcttgtattttatattacaggtgtgatcaccaacgcattgccgtcaacggcggtggcatcttttgttatctggattttcgttgttctttttgcagcatggctggtgtataacctgacatccaatataaagatcgcagttgcggcggctatcattgcagaagctgttaatattatcattttctttgtaaaatcagaatggatggccggttctgtggcaaaagtgctgggtgcctttaatatgacatccttcttttccaacttcggttccggtgtctttgatataacaggtattctctattacctgtctattatcggattcagcatctttttgacgatacagtccattcagcgcaaacgctggggcggcgatgccctgatgacagccgttgtgctggccatcattgtggtgatcaatctggcagtgggtcagattccggtgaaatatacacagtttgacctgacggataatcagctttatacgattacagatcagacgaaggagttcgtcaagggattggattcagatgtggatgtttatctggttgcccagagcggacaggaggatgaacagatccagaaagtgctggaacgttatgagtctctgtctggtcatatcaaagtgcatacaaaggatccggtggtcaatccgtcctttacgaaacaatatacagacagttcattgtcagacaacagcctgatcgttgtgtgtggggacaaatataaagtcatcaattacagtgatatttatcagtcggaatttaattattccacatacagcagtcagacaaccggattcgacgcagaaggtcagctgaccagtgctattgattatgtgacatcagatactctgccgaaactgtatacactgacaggtcatgatgaagcatccctttctgataccctgaccagccagattgaaaaggaaaatattgatatagaagaattgaatcttgtaacaagtgaatctgtaccggatgatgcagactgtctgatgatcaacggaccgcagaaggatattacagcggacgaaaaggatcgaattctgtcttatatggaaaatggcggccatgtgctgatattcacggattatacagaaacggatatgccgaatctggcagaacttttgaataattatggtctttccacaagtgcgggattgatttttgaaggcaacagccagtattattatccggggtatccatcctatctgattccgagaatccagagtgccgatgcagtgggcagcatgacatccaaggatctggtgctgatgccgtatgcacagaatatcaatatttctgatgatgtgcgaagcactgtgacaacagaagctcttttgcagacaagcagcaagtcgtatattaaaacggatctgaagaatctgacaacaacggaaaaagcttcaggtgatgaagagggaacgtttacagtgggtgctgcagtcactgaaaattataatgatgtggagacaaaactggtttatttctcatcctcagcaatcctggatgaaaatatgaatcaggctgtgtccggcggtaattatgaactcatcagcaacgtgatgagctggatgatcgataaagaagaaagtatttccataccgaccaagagcctttccacaacctatctgacagtgacagctgcagatgcgggattctggggtgccgttgtcatcctgattccggcggcccttgtgatcggcggcggtgtcgtatggtttagaaggaggcgtaaatagcatatgaagaacaggaaaaaagcgcttatcattgctatcatctgcctggcggcggcagctgttctttatttactcgttgtgaagctgagtcagaggtcggaggatgcggacagctctgatgactctctggtgatcagcagtgtggacagtggtcagattacagccatttcttatgaaaaagacggcaaaagtctctcctttaggaaggaggacggcacctggtataatgcggaggacaagagttttccggttgaccaggacagcctgacgaccatgaccaatgccctgggtgcggtttcagctacccgaaaactggattcaccggaagatttgtcggaatatggtctggattcgccggtattgactgtgcgatatatggccagtgacggcaaagaggcagaatttaccgtgggtgataccaatgatgcggccggtgggtcctatctgaaaatcagcggagatgacgcagtttacctggtggcgtccgattttgccgatacgttcaattcggatatctatcaactggcggatatggagagcttcccaaccatcacatcggacagcattacggatatcaatgtcaaatccggcagccatacactggaaattaagaatgacagcgatggcggcgggatagttcttgaaaacggtgaggaaaaagagaattgtgcatcatcatctgtaacacagtttatcaacactgtgacaggcatcacatttaagagccatgtagagtataattgcaaagatttgtcgaaatatggcctggacaaaccgacagcggacatttctgtggattataccacagcagagacagtgacagaaacatcagcagaaagcgtacaggaaactgcagatacagaagaaacagagtctgaaacggaaactgttgaggtggccaaacagctgatactgcatatcggcagtcagaatgaagacggcgattactatgcagccttagatggttcaaaagaagtccatgttgtcagcggtgatacgatcaaagaactggttgaaaagaaagcagcggattttacggataatacgattttgtccggttctctgaataatgcaaagggtatcgatgttgccatcggcagtgacagttggcatctggtaaagaaagaagttgccaaagcggatgatctggcggacagtgcagaaactgagggtacagattcggaaaaggcaacagaaactacagatgcgacagccgatgaaacgactgcagatgcagagaaagtggatgaatctgagacagagacagaagaaaaatggtatgccggagatacagaaattgctttgacagatttatcttctgcctacagtgatctttcaggcatgtcggcggagaagattctggatacagcggcaaaatcaaccggtgatgcggccatcagtgttactgtcaagtgggaagatgataccgagacaaccgtatcatttacagtctatgacagcagcttccatctggcagaaatcaacggtgaggccagaaaactggtgaataagcgggacgtcgaaaaacttgttgaagatatgacggcgcttctcaaaaaataaaaaagtgtgcagcttcaagcaacagcaaagggctttcaatggaacaaaatcgttttcgttgaaagtccctttttttactccaggattgattgcgaccggggagagaaaatggtatgattaaggtaatgtttgggtgaagagatatagggtcaggaaaaaataaatttatgatacagggagaataacaatgattgtgaatttcagctgtccgaactgtggggcagatatgtcatatgatatcaagcttggaaagctttactgtgcgcattgtgatcacagtgaggatatccgaccggatgaggagaattataagaatgcggccgaagaaccggcagataaaccgcgttattgtgtgaattgcggcggtcttttgtcagcgggagccaaaacctgtgccacgcactgtgaatactgtggggcaccgttggtgatggcggaccgcctgagcggagactggcggccggcctatgtgctgccttttgaactggacagggagaaagcggaggcagccttcagaaaatggtgtcataacggtcgattttcgccgaagggctttatggcggcaaagaatatccagcgtctgcagcctttgtacattccatattggctgtatgatatgaatgccagtgtggatgtccggggaacggcaacccgggtgaatatttatgtgcgtggtgaaacagaatacacggagacggacttctttgatgtgcggagaaaaatgcgtctggaatatacaaaagtaccccatgacgcatcagagaaaatggacgataccctgatggcaaagctggagccctatcgttttgacacattgaaaactttccagattccgtatctggcaggatttgaggcggatcagggagattatcgttcagaggatttactgccccaggtgaagcagcaggtggccggatatgctgcagaatacgcccgttcaacgatttccggttacacaagtgtacatattgaccatcaacagatggactatgaccatatcagcagcaattatgtgtatctgccaatctggtttatttcctatcgctacagggacaaagattatatatttgccatgaatggtcagacaggtaaggtcattggtgaaccgcctgtgagcagaggaaaagtggcaggctggtttgcaggcatttcggcagcggcctttgcgattctgatggtgattggagggctgttgtaatgaaaaaaatattgaattttctgatggtgatgctgttggtcatgggccttggaatggcgtcagtgatgacagcctttcaggcagaagccgcggagactgcagaaacggccggtgaaacagtatcagccgcagagactgtattgacagcgaatcaggatggggaggcagtggctgatgcgagtatgtcagccagcggtatttatgatgcggcggatcttttgtcggcggatgaggaagcgtcacttttgactaaactggaaaaatattctgagagatacagtgcagatatcgctattgtgacaacggatgatgcaggaggattgagtgctcaggcttatgcagatgcctatgcggaaaaaatcggtcaatccatgtcgagagatgaatatccgggtattttgtttctgattgatatggataatcggcagatttatatggcgacccaggggcgggccatgaattattatgatgattatagaatcaataaagtgctggataattgctataatcacatcacagatggcgattataagggcacctgcgatgctttcctgaaaggtgtccgtgattatatggggcgctccacagatagaagtgcccgcatggatgcatttggtgtgctgcttcgactgattatcgctattgtcatcggcgcagttgtgacttttgccatggtattcagacgcggcggccgtgtgacaaccaacagccggacgtactttgacgcatccggttcacatctggatgccaaagaggatcgctttatgaaccggacggtaacaagacgtcatattgagaaaccgaagggcggaggcggttccggcggctcaggcggaggcggcgtgcatatgagcagcggcggaggtacccacgggggcggcggccggagcttttaaattgctaatcgtccaccacgtttttcttaaatcctacggtataatttcgaggaaaaccaatacgataataaaattcatgtgcgtcggtgcgatggatggaagatgtcagattgacatagcgtccgttgtgtcggcgcacatagtcttctacatactgcatcagggtctgaccatagccctgctggcggtaattttcatcaatcaccagattctcaagggaataataaaagcgggctttggccgtcagatcaagacatttgctgagggtaatggttcccaccagcttgtctgcatcgtcaaaaatacccaccagatgataatgcgggtcatctttcacttcttccagaacgcgaatcatgtcttggatgtctgaggtccagtcatcctccagctggcagtagagacggtgcaggtctgtgtaatctttgggggtaatctcatgtatcttcataattatattgtctttccacatcaaaatagggcaaaaattttggatttttgcattgttaggtaccttactatcgtatttttctaaaaccgtctcgcaacagctatattgggaataaagtaaatcgcatagttatcaacaacggtataaacgccgtatttgcttcggtaacaggccagggcttcttcgagataatcttccgtaacatccagatattctgccatctcatagcggttctggcagtgatgttcaaaagcacggataataccgcgcagtccgatcagacggttatatccccacaggcgggcatccaattcctgctgtcggctgtttacattcttcaaattggtaatgtcaccgacacttgtaaagtgatggcccatttcttcagccagaatggaggtcttctctgcagtggtcttcagctgtgaatccagcgcaatatggccatctatatagaggccgtccagacgtttctctccggtgctgtcgccgttcaggtcaacagactcatgaacgcgtacctgttcatcatcggcatcctgcaataattcttcataagtattcaggtgaatcacttcctttgatcatcgaacttgataaaggcggcaaaagccttaatcttctcaatctgttcaggtgtaaattcattaccgtcaaaatgagcggcaatggtggttggtttctcaggtgcgtagccaaatgtgccgaggacatcttcgacaccgtaggcacggcacatgactaaaagggcgtcaggggtgggctggctgttgccgttctcccagctgtaaattgtcttctcggatgctttaaaaccattggcagtcagtaattcagacatttcccgcacggacttccccgctgcaattctgcattttcttaaggtttcacctacagtgctcttcattgaaaaaatctccttctatcatcatcagttgtcttgtgaaatatcagtatccttataaagaacagtcataacagaaacatagatactgtttcggctgatcgaaatgaagcatctgggatactgagagtttcatgcctttttgttttctgagattattataccattatcccagaaactcgtcaataatttctgaaaatataagaaatgactattgacattcttagaaaaaggaatataatgacttcaatatcacgaaaactaagaaaattaaacaagatattcttcaaatgtaagaatacatgtaagaaagaatgtctgagaaaagcagaactcaatgcggaaaacttgtttctgaaaattcgagaatacagttggaattccgggatggggctgccgtgatgatgacatggcaacattatctgtatgacggcagtggccagctgatggttatccgttataagggtgcggattactattatatccgtgacggcctgatgacgatcacaggactggttgacgccaatggcgcggctgtagtaaactacagatatgacagttggggaagactattgggaatcacaggcagcctggcagagacacttggtaaggacaacccgtacagatttaaggggtactattatgattgttttttgtcaagcacttttccctaaaaaaagcgtcagaattccctgtttttagcgagggattttccctactttaggagagaactgttggacaaggaagcttccccagctttgggctgtacagagcctatgatgtttgctttggcaggtgcaattacccgcaagcacgctcccggcaaggtgttgcgtgttgatatggtgggctgcggcttaatggttacaggtgttcaggcagtcggtattcctaataccggcggtaaaaccggcgcattcttggcatctgctgtaggtattgtaaacggtgatgcagaggcctgtaaagaagtactgcacaatattcgccctgaagacgttgttgcagcagaagaattgattcagaatgctgagtttacactggacatggacaatagcaccggtaaacaggtgtatttcaagctgaccctcacgacggatgaacacgttgcaacagttatctttgaggatgaacatcatacatggacatatttggaagcggacggcaaagtgcttgttgacaatcgcaaacccgcaggtgaaatgctgattcctgcaaatgacattgactgggatgtttttacgattgagaacatctataattggtgcaaaacagctgatatcagtgaatttggtcgggcaaaagaagctgttgaaatgaatacaaaggtcgctaccgatggtttggaaaatcctcgtggcattcagacggctcgcattctgcgtaaaaacgtagaaagtggtttcgtagctgaagatgaaatcacacacgttttaatgtggggcacagctggtccagacgctcgtatgggcggcagtgactaccctactatggtaagtaccgccagtggtaaccaagggctgatggtcgttatggctccttgggcatctgctcagtatcgcaagatgagcgctgaagatggttaccgtgctgtagcctttgcattgctgatgaatacctttatgaaatatgcttctaaagaatatgtttatatgcctcctacctgctcctgtgcaacaacagcgatacttggctcagtagagccattgagcaagaagcccccacttcaaaatctgtgatttaagtggtgggagcatgtcacgtatgatataataatatgaataggtgttgatttttgagatgattttgtaaagtgatgggagatggatattgatggagcttttagatgttgtggatgagaatggtattcccacaggggagactgttgagcggagtattgcccatgcgaagggaatccggcacagaacatcccatgtctggcttttgagaagaaggtcgaaatgtgtggaggtacttctgcaaaagcgcagtgataataaggattcttttccgggatgctatgatacatccagcgcggggcatattccggcaggtgttgattttgaagattcagcactgcgggaactcagggaagaactggggcttacagcggattcttctgaattaaatgactgcggattgatacggattcagtcggagtctttttttcacggcaaaccatttaaggacaatcagatcagcaaagttttctatctgttaaaggatgtggaaccagaacagatgcagctgcaggattcggaagtttcaggggtactttggttgccgctggatgagtgcagacgccgtgtgcgggacaatagcatgccgcattgtattcttcctgaagaactggatatgctgcctttttagactggtcaggctgcaagtcagggttgaataaacgaatgatgcagatattcaacacgaaaatgatggggaattgttggaaagcggttgaaaattcccataagagtcttgacaaaatgggtggttcatggaataataaatgtcagtaagcagaagcaggcagggatgtttgacggaagcgacagtgagtaacagaaagaaggagcagatatgatagcattaggacatcagcattcatggacaacagatatgatgatgtgtagctgtggcatcatgtgtggtatgcatatggttgatgacacggttgtttttgatgcgcagtaatatctggttcataattcttatgggactctgagtgtatgaagagataaggataagatgataggcaggtacatgcgtgtacctgcttttttgtgcaatggagattgttgtatgatcatcagctgcacagaggcatcaggtgccggagggcacgatgtgatcgcatatatgcgggaaaggggattttatgtctgatattgaagtccgacatctttcgaagtcttttgacttaaagggtgtgaaggtagaagcactgaaggacattaatctgagtattaagcccggtgatatttatggtattatcggtatgtccggagcaggtaagagtacattggtacgatgtctgaattttcttgagagaccgacggaaggtgaagttttagtcggcggcaaggatctgtcaacactgacagagaaggagctgagaaagcagcgtcaggagatcgcaatgattttccagcatttcaatctgctgatgcagaagaatgtgatagacaatatttgttttccgttattattgcgcggcgagaagaaggcagatgcgcgcaggcgggccatggaacttctgaaactggttgatctggaggaaaaggcaaatgcttatccgtctcagttatcaggtggtcagaaacaacgtgtggccattgcaagagcccttgcatccaatccgaagatacttctttgtgatgaggccacaagcgcactggatccgcagaccacagcctcaattctggcacttttaaaggatatcaatgagaagttcggtattacaatcgtgatcattacccatcagatggcagttatccgtgagatctgcaagcatgtggcaattttgaatcatggcgttctggtggaagaaggggaggttgaagagattttcaaccatccgaagtcagaggcagcccgtgaactgattcttggggatatttcagagaaccagtggaatggcgagacgcgtcagaaggagagagtccttgaagataagtgtctgcgtattgtctttactgagaattcggcttttgagcctgtgatcgcgaatatgatcctgaagtttggcgtgccggtgaatattctgaaggcagatacgaagaatgtgggcggtattgccaagggcgagatgatccttggtcttccggaaggccatgagctgcaggagcagattaaggcatacatggttgagaaaggccttgaaattgaggaggtgacgcagtatgtttagtcaggaagtaatggagatgctgatcaagggtatcggtgagacattgtatatgacgcttggtgcaactatttttggttacgtactggggcttccgatgggtattattatggtgacaacttccaaggatggcatcagaccgaatgccggcgtgtataaagtgctggatgtgattgtcaatattggccgaagcattccgttcttgattttgctgattttgctgatgcctttgacaaaggccattgtgggcaagagctatggctctacagcaacgattgtaccccttgttatttcagcagcaccatttattgcacgaatggttgaatcatcactgaatgaggtggattcaggtgttattgaggcggcaaaatccatgggcgcatcaacgatgcagattattacaaaggttatgcttgtggaagcaagaacttcactgatcgtcggtgtgacgatcacactgggtactgttttgggctactcagcgatggcaggtaccatcggcggtggcggtcttggtgatattgcgatccgttatggttattacagataccaggcagatatcatgatcgtgacggttgttttactggtagtattagttcagttgttccagacaatcggcatgaagctgtcggttcgtttggacaagagaaagtagtatgtaattattcagggtcattgtgcaaagcattttgaaagtgacgttgaattattataaatttttatttatttaaaatatgaatggaggaattcaaaatgaagaagagatttttagcaggcgttctcgcaggcgttcttgcagttggcgcattaacagcatgcggttcatccaacacacagagcagcacagcagctcagacagaagcaggcacagaaacagctggtacagaggcagcaggtgagacaacagcagccagcggcgatctgacaccaatcaaggttgcagcaagtgcaacaccacatgcagaaatccttgaacaggcaaaacctctccttgcagagcagggttatgatcttcaggtaacagtattcaatgattatgtacagccaaacgaagttgtagaatccggtgatttcgatgccaactacttccagcatattccttatctggaatcctttaatgaagaaaaaggtacacaccttgtgaatgcaggcggtatccattatgaaccattcggcatctacccgggtacaaagagcagccttgatgatttagcagaaggtgatacgatcgcagttcctaacgatacaacaaatgaagcaagagcacttctgctccttcaggataacggtatcatcactctgaaagacggtgcaggtcttgaagcaactgtaaatgatatcgctgaaaatccaaagaacatcaagatccaggaacttgaagcagctcaggttgcccgtgtaacaggcgaggttgcttatgttgtattaaatggtaactatgcacttgaagctggttattctgtaggcaaagatgcccttgcttacgagaaatccgattctgaagctgctaagacatatgtaaatgttatcgcggttaaagaaggcaacgaaaacaatccggccatcaaagcacttgttgatacactgaaatcagacacgatcaaacagtacatcaacgatacatatgatggcgctgttattcctttcgaggactaatattctgaaaggattgtctgagacaatcataagaattagataatcatcaatacaacaaaaaactttcggggacggcgtgcctgtgcatgcgatgtcttcggaagtttttttgtgcagatgacaacgcgctgaagtgccagactattcagaaatgaataggtatggaaattgagattgcaattgtgtcagaattaaaattttcaaaaatatcagcagaatccctatcattgactgctttagtgtggtatagtataagatagtgtgtgttgcgcctttaagacaatcttcaatgacaggagattgacaggagaggcatttgacgaatgttgtttttggacacgcacgattaagaaggaagaatgggagggtggaaccatcacatggtggagaaaatcgcttttacaaaagaagaaatcgaatccagagttaaggtgcctgccattgttgaggtggagttaaaacatctgatagaggaacgactcaagcagagcggactctattacagaattttttcgaggataaagacatcggaatctctggccagaaagtatcaggtaaagtcttataatgcggataagaaaattcaggatctggtggggctccgtgtagatgtttactttgaagatgatttaagaatatgcagacagatgatggagcgcatgttttcccttgtggaatggtctgagtctgagcagaatgaagtggaattcaagccggtgaagatcaatggcgttttccgtttgccggattatctgaaacagcagatttcggatgaaacatgggagatgtgcattgatgatactttcgagatacagttgaagaccgtattttttgagggttggcatgaaattgaacatgatatgaaatataaaggcggcgagctctggagcggcaagaacagttttgccagatattttaacagcattcttgcaacattggagttgtgcgataagtcgttggtgactctttttgaaaatctggggcatgagctttataaggagcgcaattgggccggtatgatgaaggcgcactatcgcctgaagatggaagaacgcccgatgtatccggagcttgaggaacttctgaacaatgaccgttcggaggagaatcttggtaagcgcctgttcaaaacaagccgtcaggtactcgtcgaagaactgctgaaacagccgagacgtgtgccgattaatgtgaataccattgcagccctggtcaatgaagcggttatacatgatgaacgtctggagaaactttttcatgacagagatgtttttgatgacggtaatgagaatatcggcgaggaaatgactttcggtaagctcagacctctgagaaaagtgacggtattcaaggcacttgtgaatctcagtacgtataaatattccaagcatgatgcctgtatagaggctgcccggttggcctattcatggatttatgacaagtatggtcatttggacggtgatctgccgacggagcctatgacttttgagaagaaccttctgggctatcggctggtgattgtgtatgaaccggagcatgattactggaaaatgaactgtatgcatattgatatggaagcacccggacaggtgtgggtgacggaagcagagtgctatccggaggaggatggccgtcagatgctgtctgtccgcaattcctatgcggtgtcagaggagcgcagaggctatttaaaccgttatttcagctgtccgaagttttactccaatattgcggataaagttggtctttttgatgtgagatatctgtcaacatccagaaagattatccgggaataccagattaagaagattcatgatctgattctcagccgcagaagaaccatgccggtctgtcttgtcgtgtcttatgaacgagacaatggatggctcaatgaggattggcttgagaatttcagggtatatgattttacaaggatggcagggcggtatacccatatttatacatgtaacatggatattggcaatcagcttctggaatcattggatattcctctggaagaaccgactgtttttgtatttaaatcagcggtttctgttcggaatggggatattatcggccagcggactgtatacaaagaggaggatattcttaattgcagctttggacgtcagcagatgaagcaggaaggacgacgttatgatatcgtcaaaggcggccaggcgttctaccataaattattgcaggaaatgcgtgcagagatgatggacgcgtagaggaggaattggtgagttatgattcaggatatcgcaccccatcactatcataatgaatatcatcattttgaaatccagaagggagattgtgtgctgttttacagaaagcgtgaagtccttctggcatatgatgatgagcagattgtttatccgaaatacgaggaaataagcaagaaagaagcaagacaatatagctatctgtttcggattgatgattgtcgttatttcctttgcagcgaaatagacgagacattactggatctgtatcattttgaaagtattcagaagatgcgaaaagcacagccgaaatatcaggcctttgcaggcgttacaggtcttcagctggcagaatggtacagaagcaggagattttgtggacgctgtggcgctgcaatggttcactcgacagaagagcggatgatgcagtgcccggaatgtggccttatggagtatccgaagatttcaccggctgtcatcattggtttaattcatgagaataagattttgatgtcgaaatatgccggtcgggcttataagaattatgcacttctggcaggattttctgagattggagagtcggtggaagaaaccgttcaccgtgaagtcatggaagaagtaggacttaaagttggtaagctgcattattataagagtcagccctggtcctttactgacacgttgctgatgggtttttatgcagaactggaaggcggagaggacattacattggatcagacagaactgtccatggcggaatggtttgagcgggaagaaataccggtgacgtatgaggactgcagcctcaccaacgaaatgatcatggccttcaaagaaggcagaagtcactttaattaatgaagcgtgcggtttgcatgctaagaaaaagatatcaagaagagctgtttaacacaggcacactttcgttgacagcaattcgtagcggtacataaggcagtaaaaaacactgcctaaggaccggcgattactgaaacgtctgtgttaaacagctcttcttgatatcctttatctttgggtattagaccgcacgctattattaaatgaatacttgaacggcaaatatcaacctgcatgtcattcaaatgcttgaacgtcaattgtgaaaacattatatgtaggaatgacctttgcttccttgcggatcaaaataaaaggagagaatcaaaaaacatcaaaaagagtttctaaataagtcattccatgcaggtgcttcaacgccggccagtacttaggcagcgttctttgctgccttatgtactgctgccaggtgttggcagtgcgaacgtgcctgcctggaatgacttatttagaaactctttgatagattaggattcgctcccgactatttaatgtttttcgttgaacgacgggcattctgactgatgttcgtattggattttttgccggaatgctgtgtctttttgacagacttgccgttcttcttgttttcttcggctttcttctcgcgacgctttttgaaatcgaggtaaacacagtagagaacgatagtagcacccagaatagatgtatagaattggctggttccctgcaaatgaccaaaataaaccatgacgagagcagcaatggcgatcactatgtaagcaataaataacatgtcagacacccctttaaaaatgtaaaattatagtaactgttcagagccaacctccaaaatgctacgcatttcgtcggtgtggcgtatccgccaaataaaatttcaaaaacagttttaaaaatgcaagcattttatacctgttttttgaaattttgcttggctctgaacagttacaaattataaaaagaaactgctgcaaaattgagtatcatttttcaattttgcagcagctatttacgtttgaatcaatcgaatgaatcaattatgaaatcttgtgaaacattaagctccaagtacagttgcaccgccaaggctgataacgatcagagatacaacgataacgatgacacagtaaacgatacatggtaagaagtttgtgcggataatcttaccttcgttgccgtttgtacctgttgtggcacaagcggatacaacgttgttaacacataccatattaccaatggcaccaccattgttctgaagagcaacgatgataacctgtggaagaccaacaagtgttgctgtctcaaactgaaggcttgagaacagtgtatttgatactgtgttggaacctgacatgaaggaaccgagaacaccgatcagaggagcgataacaatgtaagcgcctctgaagatagaaccaagaccatcagccatcatagtaagcattgagccaagtccggctgttctgccatcgatcatgtaagaaacctgaataccgtcatttgcagagttacggaagatgtaaaccatcgcaacaccgaagagaagggcaatagcagcaccttttacctgggtgaaggagttcttccatgcttccttaacagtgtcaccattcataccgtggagcggaatggtaatcagaccaacgataatgaagatgatacctgggttccagagaacagcccagctccatgatgcaccaccaaataacggaagtgttaccttaaaggccttcatagcgcctgcccagctgtctggctgtaatgtggaccatacacgagtgataacaagtgcaagaccgattaacaggtaaggaatccatgctttaacaagagacatattggactgttttggttcaggaacttctgttgtgttgagccatgagtgatcccatgtttctttttcgccgaatgtccagatgttctttggcatcaggaagcccttcttggatgtgaagaggactacgaacagagtgataacagctgctacaagagatacaagctcaggaccgatgaatttagcaattaagaggtaaataacatcgaaaactacgcaaacaaaaatgataaatggtaaaatttcaaatgccttggcaactttcttgtgttcagcatctttaccgaacattgttacaagaaggatgataccgattgtaacgatgaagaaagcaccaactgccatgttgactgctgagaagaatgtcaggttagctttgaaggaatcaacgttgccacccagggatgtaacggattcaccaagtgtagccatggctgagtttgtaggtgtacctacagcaccgtaacatacaggaacggagttgtaaatcagtgcaacaactgcggctgcaagaggtgggaaaccgacactgatcagcagtggagcagcaagggcagcaggtgtaccgaaaccggcagcaccttcgatgaatgcaccgaaaatgaaaccaatgataacagcctggatacgggcatcaggagagatacctgtaaacataccgttgatggctgccatagcacctgaacttgaaagagtgttcataatcaggatggcaccaaagataataacaagtacggcgaaagcttcaaggaaaccgatgactgtctgtaatgcgacagcaccaatgctcatcttccatacagcaacaccgatgatggcggctaaaatccacgctaacggcagcgctctcttagcaggccagttaaatgcaaccattaatacgactgtaacaatgattggaatgaaagcaagtattgcatacataacgtatacctccttaagattttttatttgcaatatcattgaatcatcagagctgctgtcaggataatcggctatgcctgacagcagcttgtttgtatcactttgccgggttcaacaaatcgggatgtttattcaatgataaacaaatcatatttaatttttattaattcgatcagtctttgacaacaacagaaacaccattagggatacatgtaagcgtagcgtccggtcctttaagttcacgggctcttgcataagcttcatcaagtgtttcgaaatattctaccttcaggtctctgatcagctgttcctgagctttatctgcaacaaagagaactttgtacttgcggacgatacgacaccagatctgtgcacaccactggtctggaagtgtctcaacctgaggtgtatgtaagcactgctggaagaatgcgtcagcagattctgcatcagcgatagaatggtagtaggattcaccgccatgaccatcctgacatgtagctaacataatgataacaccgccgtcattaactgtagcttcagctgcactcatgccctttggacactgataagcgttctgatccagaggataaccgccatttgttgtaataacgatatcagccggagcaggcttaactgcacagtagccggacaggaaatcaacaccttttctgtgagctgtcttgaagttgcctgcgaaagcagcaactgtcttcttgtcttcatcaataacaacgttgcagataaatgccagtttggccatctctgcagctgcaaccatatcttcatggattgggttcttgtcaaggatacctgtacgagcatatgggctggcgataaattcaccgcaatggttacccataacagtaacagcatcacagataccaggaaggacactcttacgaccgccggagaaaccagcgaagaaatgtgcttcaatgaaaccttcagctacaagaagagaagcgttgtaagcaactttatcaatgatacagtcaggaccggaaggaagattacctaccttaatattcttcgatgggtcatgtgcatcatgaacaacgatgttgtctttgaattcttcataaagtgcatcgccgagcttgccttttaattcttcaactgttgttggacgatggaaacctgttgcaacaagtaatgtaatcttgatatcagggttgccgcatctcagttctctgatcatatgaggcaggatatcctggctcggaaccggacgtgtgtggtcgctgataatgatggtacagtctggcttgccctttgcaagttcatacagatgtgggctgtcaataggatgatccatggcttctttcacgatttcatagccatctttgtcactcttgagcgcatcaacgttggatgttaagactggtgtgtcatcaggcacttccaaatcaaacgttgttctgccataaaggaaattaactgtcttcatacgttccacctcgttattaaattttgattagtgtatccgattcaattctgcatatatgggatggcaaaattgataggatatgacttcaacttcttttttattttagcatactctccaaatataggcaaggaaattatgcaaattttctaaaaagtattatgaaagaataaagtttgttgttaaatatgtgacgcataaaacgcaaaaaaatgatttgtaggcaatgtactatccataaataattgaatcaagatctttaaatagacatttttagtgaatttatacaaaattcggctgtagtattgtatacaacatatcgttaagaacataacatgcataattttgccgccattgcgaccgtcacgcataaatgatataatgataaaaacgaagtattttgcaaataccgtggaacagaaaggatttttttatgaatataacagtaatcggctgcggtcgatggggatcttttattgcctggtatctggacagaacaggacatacagtcactttatatggaagaaagagctcctcccatatacagcagtttatagaaacaagaagcaatggcctgctgacgctgccggaatccattcagctgacaacagatttggatgcagttgacaaggcagatgtgatcgtcatttcgattgcggctcagagccttgacagcctgatgacacagctgcagacgatgaagcttcagaataagatctttgtcctttgtatgaaaggcatagagattggtacaggacggagactgtcgcagattgcttcagcgcatctggatgtttcaaataaagtggctgtatggatcggaccggggcatgttcaggagttttataacggtattccgaactgcatggtgatcgacagcgaggacgaacaggtcaagaaacagcttttggaagctttttccagtgatctgatccggttttattatggacaggacatgattggaaatgagattggtgctgctgccaagaatgtgatcggcattgccgcagggatgctggacggcttcggcctgacaacgctgaaaggtgcattaatgtcccggggaacaagagagattgccagacttattgcagcaatggggggcaatgaactgtccgcttatggactgtgccacctaggtgactatgaagctacggtgttttcaaagttcagtcataatcgtcagtttggcgagtcttttattaagggtgaagattatggacagctggcagagggatattatacggtgaaggcccttgtagagctttcggagagatatcaggtggagctgccgatttcaaaagctgtttatggtattttatatgagcatgcagacccgcgtatgacacttcatcagctttttacgcgcagcctgaagaatgaattctgatgggcccctttacaaaaagccctgcatgattataatgattagaaaaatatagaggtgttagtgtgattcatacaatcagagaattaatagagaataaaagcgtactgatcctgggatatggccgtgagggtcgttcaagttggcagcgtatcaaagaggccggcagctacagtcggattgccattgctgatatgaaccatgttcagctggaggaaggccatccggcagaattgatctgcggaccggattatcagaagtgcctggatgattttgatgtggtgtttaaaagcccgggtattgtgcttgagcgggatattcatgattaccgttgtgagatcgtttcgcagacagaattgtttttcagacgttttggccgacagtgcattggcattacaggaacaaagggaaagagtacgaccacaacgatgatctaccatatactaaaggaaaccggacatgactgtgtgctggtgggcaacattgggataccgatgtttgatatgctggatcagatcaatgaacagacactgatcgtgtgtgagctttcctgtcatcagctggaatatgtcacctgtgcgccgcatgtaggattgctcctgaatatccatgaggaacatttggatcattacggtacgatggagaaatatgtggcagccaaagagaatatttacagaccgcagaagtcaggagatattttgatctgcaatgtagataatcttccggaagagggttcatacaaaggcagactcatcaaagtctgcgatcgggatgaagagggccgtgggacaactgcggcggatgtaactgtaagcggttcaatcattaaaaccaagaagcatacttatcagattccaacggcgcagatcagactgatcggtcatcataattatgtggacattgcctttgtttatgcggtctgcgcaatgtatgatatcagtgatgaggacttttcaaaggctttgataacctaccatccgctgccgcaccgtctgcagtacattggtgaagcatgcggtattcgcttttacgatgattccatttcgacaatctgtgatacaacgatccaggcgctgaagagtctgccggatacggatgcggttctgatcggaggtatggacagaggcattgattacagtgaactgattcagtttttgtcagtctgtgatgtgccgcatatcattctgatggaagcaaccggcagacgtatttttgaggaaatcggcaaatattatccggcgtttaatggcacagaacgaatcaaactggtttaccatctggatggagcggttgctttagccaagaagatctgtcgtcagggacattgctgtgtgatgtcaccggcagcggcaagctatggtatttttaagaattttgaagcccgcggcgaagcatttgctgaacttgtacgggagggcgtgtaatgtaccgttatattctttttgatctggatggcacattgacggacccgaaggagggcattacaaaatgcgtacaatatgcgctgcagtattttggtattgaggcggacacagaggatctggtggatttcatcggtccgccgcttctggaatcattccagaaatattatcagttggatgatgcccagggacatatggcccttaagaagtatcgtgagcgttttaaagatatcggcatttttgaaaatggcgtttatcccggcattcatacactgctgtcagacttgaagaagcaggggcgaagcattgccctggcaacttcgaagccggaggtttatgcccgacgtatccttgataaatacgaattgatgccgtattttgatgtggtggtgggaagcgaaatggatgggcggcgaacggataaaggcgaagttattacggaagcgctcagacagctgcaggtcgctgatggacagaggcaggaagttctgatgatcggtgacagactgcatgatatgatcggtgcaggaaagaatcatgttgacaaattgggcgtatattacggatatgcacatgaaggggaactggaggaagccggagctgattatacggtttgtacagttgaggaattgtatgatttctttaaggcacattagaaaagtgttcggagtatttgggactgactgaatattttcgggaaaggcaggggaaggccttggataaggtatatgagaaggcgtacgagaaagtcattgattatattgagagcaatattctggacggccattttgaagtaggagataagcttccctctgagcgggaattatctcagatgctgtctgtcagcaggaattccgtcagggagggaattcgtattcttgaggtcatcggtgtgatttccagtcagcacggcatcggcaattacattgcagatcattttgataagacccttgttcaggtgatgaccatgatgtatgcccttgagaagatgacatacaatgagatccgtgaattccgctatgcggtggagtttcaggcagttgtactggcaatggacaatatttcacatgaacagatagaaaagctgaaggcgaatcttgaggtgctggagaacagtgcggatgaggaagaacaggtgatgagtgataagatgatccattatacgattgtggaggcttcgggcaatcgtctggtcatggctaattatctggcattggctaagattatggacaattttatccgtgagacaaggtccaagatcatgactaatgaacgcaaatcgatgacatttcagggcatacacagacatcttgtggaggccatctgcaatcgtgatctggagcttggcaaaagagcattagatgaacattttgtttatatttgtaaaaatatggacacttaagtccgggagacgttgaattctgcaagtcaacaaagagtcaacaagaggccaagcgaaacggtagacaaaagaaggagaacattatataatatttatatcaactggtagtaccagttggagacgcgaatgcgtcatatctccttaattgattgaatcaagttgtatcttgccgggttcaacgaaacgcaacggaataaggatgtttttctttttaaaaaagagccattgcaaaataaagtggtgtattttgtaatagctctttttttctgctcttttttccatacttttaaaaagtttgcctactgcaggtcaattatgctataatgaaatggattatgctatttgcgtagcagtctgaatgtaagggcggtgaatatggcagtttatatagatgtgattgtggatatatccgtgaacagtctggatcgtatttttcaatacagggtaccggaggaactgttggatgcggtgacggtgggctgtcaggtcaatgtgcctttcggaagcggtaatcggagacggcaggcctatgtcattggcgtggataccgtgttggcttatgatgtgtcgaagatcaaggatattttgggagtgacgaaagcaccggcggcaacaggacagctgattgcgctggcagactggatgcacgaacgatatggctgtacgatggcacaggcgctgaagacggttctgcctgtcaagaagtcagtgaaggaagtgaaaaggacagcctacttccttgcagacagggagggcgcgcagcagctccttgagaaaagcaggaagagtaggcgtgagaaggctagggtcaggcttctggaggcgatgctgaaggaaggatgtatgtcgaaggaaaccgtgaccggggtactgcagatttcagcatcaacgatgaaatcaatccttcaaaccggcgttatcagagaggagacctcgcaggtgtacaggaatcctgtgagacagagacttgacggctggcaggaagtgtgcctgaatgatgaacagatgaatgctgtggcatccatctggcagaatgcggccatttgccgtgaacactggagcagagagcagggaatgcatcttttatatggtattacaggcagcggtaagacagaggtttatatggccctgatggagaaagttctgaatgagggtaggcagattattgtactgattcccgagatttcactgacgctgcagactgtttcgagattttatgcccgattcggcagtcagattgccgtgatgaattccagactttcagccggagaacggtatgatcagtatatgcgggccaaaaggggggaagcctctatcatgattggcccgcgttcagctctgtttacgccttttgacaaattagggcttattattattgatgaggagcatgaatctgcgtatcagagtgagatagtgccgagatatcaggcagcggaagtggcggccagaagggctgagatgtccggtgccctggttgttcttggatcggcgaccccttctgtggcggtctatcagaaggcccgggagggaatgatcggtctgcacagtctgacccagcgggccaggacgggcagccgccttccggatgtgaaggtggtggatttgagagaggaattccgaatgaagaacagaggcattctcagtcagtctctgcatgaagccatggatgcatgtttaaagcgcggcgatcagatgatgctttttttaaaccgacgagggtatgcaggctttgtttcgtgcagaagctgcggttatgtggtgaaatgcagacattgtgatgtgtctatgacggtgcatcatcataccctgttgaaatgccactactgcggcagtgaacagccaatgcccagagtgtgtccttcctgcggttcaccctatattgccggtttcggtgtcggaacacagaaggtggaggagtttgtacagaaggaatttccggaagcccgtatccttcggatggacagggatactacatcaggcaaggatgacatgggcaggatcctgcagactttttcggagggcggtgcggatattctgatcgggacgcagatgattgtcaaaggacatgattttgccaatgtgaccctggttggtattctggctgcggatctgtctctgtttgcaggggattatcagtcctcggagcgaacatttcagctgctgacccaggcggcgggaagagccggaagaggagacaggccaggagaggttattatccagacttatcagccggagcattattgtatacagacagcggcggcgcaggattatgacagtttttatagccaggaaatccgattcaggcagatgctgcattatccgccggacaggcagatgatggtgatgcttgccgaaggtgagcatgatcagcagacaggacaggcagttcagaagcttcgtgaaatcgccggagaggcagattttgaagcggtagagtttatcggcccttccagagccggtattgcaaaggcgaaagatctgtacagatacacaatgtacatgaaacatcaggacatcaaagaactgatgcggctcagggatttcctggaaggatatctgaaatggtcacagcagttctcaaatatatattttacttttgatatacgtgagtcataggcggcggtttgtgacagcacaaagaatgacaaatgaagcagttaagaaggagtgttaaaatggcaattagaaaattacgttatgaaggtgaccctgttcttggtaaggtttgcaaggaagtcaaggagatgacaccgcatctgaaagaattggtgcaggatatgcttgagacaatgtacgcagcagaaggtgtcggcctggctgcacctcaggtaggcgttcttcgccgtattgcagtgattgatgtgggtgaaggcccatatgtttttgtgaatccgaagattgttgagacagccggtgagcagattggtgatgaaggatgtctgagtgtcccgggcaagagcggtactgttcgcagaccggaatatgtgaagacagtggcctttgatgcggatatgaatccgattgaggtggagggacatggccttttcgcaagagcgatgtgtcatgaatttgatcatctggacggtcatttgtaccttgaaaaggtagagggcccgcttaatgaagtgagctatgcagacgaagacgagaattaggaggcagaatgatgaaagcggtatttatgggaacacctgattttgcagtgccgacactgcagaagatggttgatatgggaattgagataacggcagttgtgacccagccggataaggcaaaaggccgcggcaagaaagtcatttattcaccggtcaaggaatgtgctctggcccatgatcttccggtttatcagccggttcgcatcaagaaggatcctgaatttattcagacactgcgagatatggcaccggatgtgattgttgttgttgcatttggacagatcctgccaaaagaagtcctggatattccgagactgggctgtgtgaatgtccatgcatccctgcttccgaagttccgcggtgcggcaccgatccagtgggcgatcattgacggcgagaaagtgacaggtgtgacaaccatgctgatggatgttggtctggatacaggtgatatgctgctgaagacagaagtatctgtggatgccaaagaaaccggcggcagcctgcatgataagctggcggcagcaggcggtgaactgcttgagagaacattaatcggcctggaagccggaacaatcgtacctgagaagcaggatgacagtcaggccggtgaatacgcacgtatgcttgacaaggaattggggcatattgattttaatcagccggccgttgtgattgagcgactgatccgcggtctgaatccttggccgagtgcttatacgtatattgacggtaagacattaaagatctgggaagcagaagtgttggacagaaactatggctgtgaatacggtgaagtggcggaagtgaccagaaacagtctgatcatccagactggtatcggtgcgctctccgtgaagagtgtacagctggaaggaaagaaacgtatggatatttcagctttcctgaatggctataccattgaaaaaggcacccgcatggattttgagaatgaaacaaatgaataataagtctgacaataaaaatgaataagacagaatggaagtgacagaatgtattatccaatgtatgttgatccgacatatattttgattattatcggagtgctgctgtctctggcagcttccacaaaggtgaaatctacttttggaagatattcccaggtacgttctttgagcggattgacaggcgctcagacagccgagcgcatcctgcgtcaggcaggaatctatgatgtaggcattgcaagggtttccggagatctgaccgatcattatgatccctcttcaaagacgctgcgtctgtcggattctgtatatggctccaccagtgtggctgcggtcagcgtggcagcccatgagtgcggtcatgcgatccagcatcagaataattatgtcccgcttaagattcgcggtgctctggtgcctattgccaactttggtgccggtatcagctggcctctgattgtcatcggtattctgatgggaggaagcagtcttctgatcaatatcggtatctggatgtttgtagcggtggttgcatttcatctggtgacacttccggtggaattcaatgcatcttccagagcattgaagattatggaatcttcaggtattctgcatggggatgagaatcgctatgccaaagaagtactgggagcagcggcattgacttatgtggcaggagcagcgtctatgattctgcagcttttgcgtctgctgattctgacaggggctttcagaagaaacgatgatgaacggtaaaggagttttatatggcagataatatcaatacacgcgccattgtttatgatatgctgatgagcgtagagaaggagaatacgccttcacatcttcttttatcccagacattgatgaagtatcagtatctggacaagagggacagagcgtttatcagcagacttttcagaggaacattggaatatgagatttttcttgacggtgttatccggcagttttccagtgtacgtctgaataagataaagccaccgattaaagtcatcctcagaatgtctgtttatcagatactgaagatggatcatattccggatgcggcggcctgcgacgaggctgtgaagctgacgaggaaaagaggacttaagaatctgtcgggttttgtgaatggtgttttgagaaatatttcccgaaataaagaggttattcattatcctgatcccgaaaaaacaccggcagcctacatttccatgcgatattccgtgccggaatggctggcagaaatgtggcttcgtgattatggctttgagatgacggcagagatggggcaggcgatgctggatgaccagaaaacgacggtacgcgtgcgtgacagtcagaatatggcagcggtgaaagaagcattgcggtcagagggactgaatatagaagaaggatgcatgcttccggaagcccttcatctatcgggatatgattaccttggcaatgttggtccttttgcagacggacgtataactgcccaggatgagagtgcgatgctggcggctgtggctgccggaattgccggcggggaatcgattattgatgtctgcgcggccccgggcggtaaatgcatgcatatggcggatattttaaagggcagtggacaggtatctgcaagagatctgacagaggcaaaagttttaaagattcaggaaaatcttaagcgtaccggattaaagaatgtttcggcagaagtgaaggacgcccttgtgttttatccggaagatgcacagaaagcagatattgttatggcagacctgccatgctcggggctgggtgtcatgggaagaaaagcggatatcaagcgttcggtgacacctgagaagataaccgctctggcagcgcttcagagggagattctgtcggttgtacagcactatgtcaaaccgggcggtgtactggtttacagtacatgcacagtatcaaaagcagagaatgaagagaatatgcagtggtttgaggaacattttccgttcggcctggagagcctggatgcatatgtacctgaaaaggtccgcaatgaacagacgaaagcaggctggattcagatccttccgggacagtatcagtcggatggcttttttattgcaagattcaggcgcagtcgggatgaaggagcagagtgatgagtgacaaaacagatatcaaatcaatgacacttccggagctggaagtttttacgacagaagtattgggagaaaagaagttccgtgccaaacagatttatgaatggatgcatgtgcgtctggcggattccttcgatgaaatgaccaatttgtccaaggatttgcgtcagaagctttcagaacagtgtgtgttgtcacatcttgaaatggttgaaaagtacgtttcggccatagatggtacggcgaaatacctttttaaactgtctgatgacagaattatcgagagtgttctcatgcattataaacacggcaattcagtatgtatttcttcacaggttggatgtcggatggggtgccgtttctgcgcatcgacactgggcggccttgaacggcagatgctggcatcggaaatgctggatgaaatttatcagatccagaaggattccggtgaacgtgtatctaatgtggttgttatgggaacaggggaaccgctggacaattacgatgcccttgtgcggatgatcaatattctgacccatgcaccgggactggatattagtcagagaaatgtcactgtctctacatgcggacttgtgccgaagatttatgaactggcggatttgaaactgcagatcacgctggcgatttcactgcatgcagtgaatgatgagaaacgtcgtgaactgatgccgattgccaatacatatagtatagaagaaattttaaaagcatgccgttattattacagtcagaccaacagaaggattacgtttgagtacagtcttgtcaaaggtgtgaatgacagcagggaagatgctaaagcgctggctgcgctgctggaaggcatcaactgccatattaatctcataccggtgaacccgattgaagaaagaagctacagacagacagaggcagatgctgtcctcaaatttaaaaatatgcttgaaaaatatggaagaaatgttactataagaagggaaatgggcagagatatacaggctgcctgtggacaattaagaaagaaatatatggaacagtcaggagagaaggagggataatatgcaggcatatgccggaacagatattggctgcgtgaggacgatgaatcaggatggatatttctgttcaacaactcctatagggccatttccgaatttgtttattgttgcagatggaatgggagggcatcaggccggtgattatgcctccagatatgccattgagacattccttgattatatcagacacacggagaaccgcaatctgatccgtgtgatggatgagggcatcgctgaggcaaaccgcaaggttctggagaagtcttttgagaacgaagagcttgcgggaatgggaacgacgatggttgttgccttcgcagaggacggacagctctatgtggccaatgtaggtgacagcagactgtatttgatcggtcatgagattaatcaagtgacagaagatcattcctatgtggcagcgatgatgcgagcaggtgaattgacagaagagcaggcaaggaatcatccggagaagaatgtgattaccagagccatcggtgtggcctgggaagtaaaggcagatttttttgaagtggatttaaagcccggggacaaggtgatgatgtgctcggacggattgtccaatatgattgaggatcagcgtttatatgatgttatttcttcgaatagtgtagaagattcagtcaggatacttatagatgaagcaaaagaaaatggcggctatgacaatattactgttattgttattgagccccggattgaggaggtgaacgaatgttaattccaggcagttatctgatcaacagatatgagattattatgaaaatcggctccggcggtatggctgatgtctacaaggcgaaggaccatgtcctgaacaggctggttgcgattaaggttttgaaacaggaatacagtaccgatgcaacattcgttaagaaattcagggtggaagcccagtccgcagcaggtttatctcatccgaacattgtgaatgtatatgatgttggggaagatgaaggcgtttatttcattgttatggaattggttcagggaattacactgaagaattatattgatatgaagggcaagctggatatcagagaagcattgaatatttctgttcagatcgcttccggcctcagtgcggcccatgagaatagaattattcacagagatatcaagccccagaatattattatgtcccgtgacggcaaggtgaaggtgacagacttcggtattgcgaaggtggcggattcgacaactgtgacgacaacggcagcaggtaccgttcattatatttcaccggaacaggccaggggcggatacagcgatgaacgaagtgatatttattcccttggtattactatgtacgaaatggtgaccggacgtgtgccttttgaaggggagaccaatgtggcggtggcattgatgcatattcagagcgaaattacaccaccgagacagttggaaccatccattccggtcagctttgagaagatcattctgaagtgtacccagaagaagccggagagaagatatgcgtcggccagagaactgattgccgatctgagaaaggtattgactcatccggacggcgagtatgttgtaattccgggggctattcctcagggcagaaccattgtgatgaacgacaatgatatcgattctctaaaagcggcttcactgcgtaaaaacttcggtacgaaaccggaagagacctatgtggaggaaccggaagaggaggaagaagaaaagccggtgcagaagccggtacagaagccggtacagaagaaacgccctgtgaagaagaaggacctcgaagaggatgatgatgacgaatttgataaagatgaagaggatgatgatgacgaagaggtgaatccggcactcagtaaagtgatgatggccttgggtatcggcggtttcattatactggctgtgattattttctttattatcggtcatgcggcaggcttctttggtggcagcggcagtctttttggtcacaagaacaaagatacatcaacggaatctatttcaacagaatcggtttctgatacatcttctgacacaagtacagccggtgagcgtgtgaaagttccggatttgtccaagaagacagaggatgaggcaaaagccgcactgaaagagctgagactgggcgtgaatgttcagacgggtacttcggatgatgttccggagggacaggtctatgatcagtctccggcagcaggtacaaaggtagatgtgcatacacaggtgacgattaatatcagcagcggtaaggaaaaattctctctggatgatgtgacgggcatgcagtatcagcaggcacaggcacagcttgagaatgatggtctggtcgtcagccttgaatttgattacagtgattctgttggttctgacaaggttatcagtacatcaccaaaggccggcagtcaggtggccaaaggtgatacgattaccatcactgcaagcaaaggcaaagaaacgaaaacgacaactgtgccgaatctgcttggtcagaatattgatgatgctattcagatgatcaaggatgccggattgacttacaacggcaagtccagtgattacagcgacagctatagtgagaaccaggttatgaatcagagcatcagtgcaggaaaaacagttgatgaaggtactaccatcagtctgacagtcagtctcggaagtcgggtgacttcttattctgcaagtattccgatcgagagcccgtttggacgtgatattacagacggtgacggcaatacggatgtttatgacagcggacaggtgacagttgttgtatacaagccggatggttcaagtgaaaccgtctacgatcagaatacatcagaaggcagtctgcctggctcagtgagtacaacaagtacagcatccggcagcggtacagtctatgtttatctgaacggtgttcaggtgagcagctatagtgtggattttgagtaatgacaagtctttaattttaagaggatgatatgaagggcaagattattaagggtattgccggattttattatgttcatgtcaatggaaagggcatctatgaatgcaaggccaagggaatctttcggaacaggaagatcaaaccccttgtaggcgatgatgttttccttgacagtctggacgagaacgatatgaaaggcaatataacagagattcttccccggagaaatgcactgatccgaccggcatcggcgaatgtggatcaggcgatgatcatttttgcagcggcacagccggccccgaatctggggctgctggaccgctttttgctcatgatggagaggcaggagctgccgaccattatttgctttaataagcaggaactgatcagcggagaagaactggacaggttatgcagcatttatcgcggcagcggatgcaaagtgctgacggtcagtgtgaaacaacaggaaggactggatcagatcagggagatactggatggcagaacaacggtcatggcaggaccttccggtgttggcaagtcctctatgactaatgctatgtatccggatgcagagatggcaaccggggctgtcagcgagaagattaagcgcggacggcatacgacaagacattcggaattattttccatagggaacgatacgtatctcgtggatacaccgggcttcagtacgctctatctggaaggatgggagaaggaggatttgaagtattattatccggaatttgaagcttattttgaacattgccgttttaatggatgcaatcatttaagtgagccggattgtgcggtcaaagaagcggttgcagctggtgagatcagcagcgaacgctatgagaattataagttattttatgaagaactggcgagtcagaggaggtattgattatgtacgaattaaagttatcaccgtcgattttatcagcggattttggcagattaggagaagatatcaaaacagccgatcaggctggcgcggattacatccacattgatgtcatggatggtgcctttgtaccgaatatttcttttggtattcctgttatcaagagcatccgtaagtgcagcgataaggtgtttgatgtgcacctgatgatcgagcatccggaccagctgatcccggaatttgccaaggccggtgcagatattattgttgttcatgcggaagcctgcaagcatcttcacagaaccattcagttgatccacagtcttggggtaaaagccggtgtcgctttgaatccggcaacacctttgtcggtacttgattatgtacttgaagatctggacatgattctgctgatgacagtgaatccgggatttggcggacagagctatattcctgcgatgacagagaagatccgtacactgcgtcatattctggaggagaaaggtcttcagaccgatattgaaattgacggcggtgtggacacgaagaatctgcgtatggtgattgaggccggtgccaatgtgcttgtatctggttcgaagatttttggcggagatattgctgaaaatgttcatcagtttaaagctatcatggcagagtatacgaaataggcaggatagagcatgcgaattttgattattacagggggcagaattgatgaggattttgccctctcattattagaaaaagaaaaatttgagcatatgatcgtggtggatggtgcccttgctttttgggataaagtggagaagaatcctgatataacatgccattttgatcatctggtgggagacttcgatacgatatcaccggaaattctcaaaaattatctggacagagaggatattgaagtccatcgttttaatccggaaaaagattatacggatacagatattgcattaaaactggcaatccatctgacaaaaagcgaaaccggcaaagcagatgcaaggtccgaaatctggcttctgggggctaccggtacaagggcagatcatatgctggccaatatgcagctgctggctcagacaagggcagcaggtgtggacggggtgatcgtggataaaaacaacaaaatccgtctgctggaaggcagttatacactgaagagggaagctcagttcggcgattttgtatcccttattccggtcacacaggcattaaagggcgttacgctgcgcggtttcaaatacctcctggatgggcataccacgtattggggagaaagcctttgcgtcagcaatgagctggaagcagaagagggctatatcagcattgaagaagggctggcattccttatagaaagccgtgattaaaaaatgtcgcacccagaataaaatgggtgcggcatttttattgcaaatggtgttccatgaagaagttgaagatggatccgttgttcatcttaaatgcttccaggataacgtcatcgacgatgttttcagatgaggcatcccgctcagccaacaggttcttgatgaccgggataaaggagaaccagagtatcgggctgtagtagttgatagatgtgatatcatagttgatcttctgggaaagctcttctccgatggccagaatggatttttgatactggtgcatatcatcgttcaattcatggatatactggtagccgtaaaagttcagtttggcaacaagacgctgttggctgaagatggcaggatcctgaatgacggtaaaatggtatttgtcagcgacctgtgcaaccatttcctgaatgagttcgcttttgttggcgaaagcagtgagagattctttgttgatatctgtcttgagaatcttctcaactttgttcatgctctggttgtagagggtaatctcatagcggatggcctcaaattcttcatccagaatttcaagtgtaccggccagacggttcagtttgcgcttgatatccatcggcggttcgtagtaggacttgtaaccgagaccatgttcaacctcagcccatgcatgctgcaggacggttctcagctgaatctcaaatcggatatcctggtacttctggtattctacaagcttgcagcgttcgtctgtgaatttcacaaccatatggacagagttataaccgaattcaatgcggttgtgcttgcttttcttacgtttatcgacaatctcacagacttcaaaagtgtcttccagcagctcaagaatgcgttctacatccgattcaaaaagagtcagaatacgacatccgagaatatccgtgatatcttcaagatgctgatatttgtccttggagataactttgttgcgaagggcttgctcagactttattctgagggacatagtagaaatcttgatgtggttggcttcgatcaatgtattgataatatcttccacatcatgctgcatttttttatagacatcaacgtgttgataatattcactcataatggtatctaaagtatgaatcatcgtttatttctccatatatttaaatataatttggtatagattaaataatcgtaactgttcagagctaaccttcaagatgctacgcatttcgtcggtgtggcgtatccgccaaataaaaattcaaaaacagccttaaaaatgcaagcattttatatctgttttttgaaattttgcttggctctgaacagttacaaataatccaatatattttaacataaaatgagataaaaatctatgataaaatggcagattgcacaattacttaaaagagtctactttttaatcattgatgacatttataatttgcctaatgggcagagggctgacatttgattaccggatgagaataattgttgaatttggcagttatctgctttataataaaaaggaaaattgaaagaatagagaataatggcagtgcgaacgtgcctactgtcaattactaattctatatatttattgagcaataaatatgtttcgaaacgtcaagataaatgaggtgttttatgagttacgcagatcaggtatttattaatatgtgccgggatatccttgataacggctgcagtacagaaggtgaaaaggtgcggccgaagtgggaagacggcagttatgcttatacaatgaagaagtttggtgtggtgaaccgttatgatttatccaaggaatttccggcgctgaccctccgcaagacggccatcaagagcgccacggatgagatgctgtggatctggcagcgcaaatccaacaatatccatgatctgaacagtacggtctgggatgaatgggcggatgagaatggttccatcggcaaggcttatggttatcagatgggtgtaaagcatcagtacaaagagggcatgatggatcaggtggacagagtgatctatgatctgaagaacaatccttacagccgccgtatcatgacgaatatttatgtgcatcaggatcttcatgaaatgaatctttatccgtgtgcttacagcatgacttttaatgtgacaaagaagccgggggatgacaaactggtgctgaatgccattctgaatcagcgctcccaggatgtgctggcagccaacaactggaatgtggtacagtattccgtgctgatgcatatgctggcacaggtgtgtgatatgcaggtgggtgaactggtgcatgtgattgcggatgcccatatttatgacagacacattccgctgattgaggaactgatcagcagagagacccatccggcaccaatattcaaattaaacccagatattaagaacttctatgattttacaacaaaggacatcacgattgagaattatgtgaccggtccgcagattaagaatattccgatcgcggtttaggaggaaatagaatgaatttgattgttgcagtagataagaactggggcattggctatcagaataagcttttgaacagtattccggaagatatgaagtatttcagagagacaacgacgggcaaggttgttgtgatgggacgcaagacactggagagttttccgaatgggctgcctttgaagaacagaacgaatattgttataacaggagatcatacttacaaggccaaagatgccattattgtgcacagtattgaggaagcattggaagaattgaagaaatatgacagcaacgatatttatgtcattggtggggagagtatttaccgtcagctgctgccgtattgcgatgtggcccatgtgacatgcatggattacacgtatcaggcggacacctggtttccgaatctggatgaggacaaagactgggttgtagcggccgacagtgaggaaagaacgtattttgacctggaatattgcttcaaaatgtacgttcgcaagacaaaattaaaagaaattgttgatttattgaaataataagtctataattggttcgttgagggatattttatttacgaatggaggaatttctaatggaaaagaaaaaccttgactggaagcatatcggttttgcatatcatacaacagattatagatatgtagctgattataaagatggtaaatggcaggaaggatatatgtcagattctccgaatattgttctgaatgaatgcgcgggtattatgcagtattgtcaggaagtattcgaaggtctgaaggcatatgagacagcagacggaagaatcgttacattccgttctgatctgaatgctgatcgtatgtatcattccgcagagcgtatggagatgccgcctttcccgaaggaaagatttattgaggctgttgagaaggttgtcaaggctaatgaagcatgggtaccaccttatggcagcggtgcaacactttacttaagaccatacatgtatgcatcaagccctgttatcggtgttaagccggctgaggaataccagttcagattgtttgcgacacctgtaggtccttacttccatgaaggcgctaagccaattacaatctgtgtcagtgatttcgaccgtgctgctcctaagggtacaggccatatcaaagccggcctgaattatgcaatgagcctgcatgccaatgtaaccgctcatgctaatggatttgacgagaatcttttccttgatccgggtacaagaacatatgtagaggaaacaggcggtgccaacttcctgtttgttacaaaagataatgaagtcgtaacacctctttctgattccattcttccttcaatcacaagacgttcacttgtttatgttgcagaacattatcttggccttaaagttacaacaagaaaagtcagactggacgagttaaaggattttgcagaatgcggtctttgcggtactgcagctgttatttcccctgtcggcaaggttgttgaccatggtaaggagatctgcttcccaagcggtatggagaaaatgggacctattacccagaagttatatgatacattaacaggtattcagtatggtaagatcgaagcacctgaaggctggatccacgagattatgtaattcattgaacgcataagataaaagattgctgtatttcatttcggtggcatacggcagtctttttcttttttaattgataaaatttgccatggagaaaaacccccggctattgacttttgggtacaggtgtattatagtgttcctagaaaggaataccaggtgatagtaagatgtcttatattgaagatctgatgcagtttggcctcacaaggcaggaatctgccatttattatgcactgctgtcagaaggcatgatgaccggctatgaggcagccaaggtatccggcgtatccagatcaaatgcatacacggcattggcagcactggttgataagggggctgctcatgtggccgagggaacgccgacacattatgtaccggtggatccggaggaattttgcggcagtaagctggactatttgaaacttttgtctgtgcggcttgtggaagaacagccgagaagacagagagaagatgatgcttatatcactatcagcggtttccagaatatctgtcagcgggcagcccgtatgcttgaccaggcacagtacagaatctacatgacagggactgcggcgatgcttgaattgttcagagagaagctggaagatcttgtcggacggcagatcaaggttgtattgatcactgagccgggatttgaactggatgaggccattatttatcacagcagtcatatagaggccgggcagattggactgatatctgattcgacccatgttttgacgggagatctgtcagaaagtgatagttgttcctgcctgtattcaggcaagaagaatctgattgatttgtttaaacagtcattaagccgccagattcagctcattgagctgggggcagcggaagaaaggaagtaatagacaatgaagaaagtaccttttgtgacaaaagaacagttagacgaaattgtgaagaaatatcctacaccttttcacctttatgatgagaagggaatcagagagaatgcaagaaaggtatataaagcgttttcatggaataaaggcttcaaggaatattttgctgttaaggcgacaccaaacccagcgattctgcagatcatgaaggaagagggctgcggtcttgactgtgcaactaaggttgaactgatgatggcgaaggcctgcggttttaccggacatgacgtcatgttctcatctaatgtaacaccggccaatgaatatgcctatgccaaggatatgggtgtcattattaattttgatgatatcacccatttgaaatatttcgaagagaatgtgggcgaatttcctgagacagtatgctgtcgtttcaatacaggcggtgatttcaagatcagcacagctatcatggatgtaccaggggaggcaaaatacggctttacccgtgaacagctgacagagggcttcaagtacctgaaatccaaaggcgtgaagcattttggcattcatgcattcctggccagcaataccaagaccaatgattattatccggcattggccaagatccttttcaagaccgctgttgagctgcatgaagagacaggtgcagatatcaagttcattaacttatcaggtggtgtaggcgttgcgtattcaccggatgaaacgccaaatgatatcgaagtcattggtgagggtgttcaccaggtttacgatgagattcttgttcctgcaggtatgggtgatgtggctatctttacagagatgggacgttttatgctggcaccttatggacatctgatcgcaacagccatccatgagaaacatatttttaaagagtatatcggtctggatgcatgtgcagcgaacctgatgcgtccggctatctacggtgcataccatcatattacagtggcaggcaaggagaacgagccttgtgaccatatgtatgatgttaccggcggtctctgtgagaatagtgataagtttgcggtcaacagaatgctgccgaagattgatatgggtgattatattattatccatgatacaggtgctcatggcttttcaatgggttataactacaacggcaagcttcgttccgcagaagtgctgctgaaggaagacggttccacagaattgatcagaagagccgagacaccgatggattactttgcaacctttgattatacaggattatttgatcggtttaaggatggtaatgaatgataagagccgtcatttttgatatggatggcatccttcttgatacagagaagatatattgccatttttggatggaagccgggcgtgaggccggttatgattggaagatggaacacagtctgatgcttagaagcatggcgccggaatttgcagagccgatgatgaaagaagtctttggacaggattttgattatcatgctgtgcggaacaggcgcaaggagttgatggctgtttatatggaaacgcatccggtagagaaaaagccgggtgctgatgaattgctgacttatctgaagagtcattacttcaaaacagcagtggcgacggccagtggtgagacgaaggcgatgacttatctggatgaggtagggctgttggattattttgatcagatcatcagcacggcgatggtacctcatggcaagccgatgccggatgtgtatcagtatgcctgcaagtgtatcggtgagaagccggaggcctgcattgcactggaagattcaccgaatgggctgatggcggcttatcgggccggatgtctgccgatcatggtgccggatctgtcacagccggatgcaaagctttccaggatattgtatggtaaggcggagacactgacggatgtgattccttatttagcagcctccagataaaatgaattcctttgatgttggtattgagtgaggtgaatacaatgaaagatatgaaaaaggttagattagtaaagtccagaacaaataagctactgacaggtgtttgcggcggtattggtgaactgatcggtattgacccgacgatcatccgtctgatatgggcggcactgtcactggccggcggctctggcgttattctgtacatcattgcagcggtgattattcctgaggatgatgatattattgattcagaataacgggcgaaactttccaggttaaaacgagatgaaccaattagcacctgtttttgaagctgctaattggttcatctttttttagactttgaagtttcgcaatgcaggtattgtgttattcatcaagatgcagtcgggaaaatctaactaaaaaaatcaattcttatagaaatccctcagatagtcaacccgggcagtcatattctgcatcagtgcgtcgataagaaccagagcggccatggactggacaacaacaacagcccttggaacaatgatcgggtcgtgacggcctttgatctgtatatcgatcggttccccctcacgggtaacggtatgttgtgtccgggaaatggaaggcgtcggtttgatggcagcccggaaaatgatttcggaactatcgctcatgccgcccagaatgccgccggcgtgattggtggccttggtgatatgaccggctgcatcggtagtaaatgcatcattgttgacagaaccctgagacctggcagctgaaaatccgtctccgatttcaaagcctttgacagcaccgatggaacagatggctttggccaggttcgcattcagcttctcaaaaacaggatcgccgataccggcaggcattccctgaatgcggcattcgatgataccgccgcaggagtcctgtttctccatctgtgctgcgataaatgcttcagcctctgcggcagcctgcatatccggcatataaacaggattattgaaaatatcttctgcattgaaatgtgccggattgatggagacaggtccgatggcctttgagtaagcacagattttgacaccgcatgcttcaagcagcttcatggcaacagcaccggctgcgacacggccgatggtctcacgggccgatgaacgtccgccgccgcggtaatctctgaaaccgtacttggcatcaaaggtgtagtctgcatgtccgggacgatagtatcgggcaatatccgaatagtcggaagaacgtgcatttttgttgtaaacaatgagagagataggcgtgcctgttgttctgccttcaaaaattcctgacatgatctcaacagcatcttcttcctttcgtggtgttgtataacgggactgtccgggtttgcgcagattcaggtaatattgaatatcggactcagtgagtgcaagcccggcggggcagccgtcaataacaacacccacagctttgccgtgagattcgccccatgttgtgattttgaattgattaccaaatgttgatccagccatgtatatttaaacctcctgattgcatacataatgaaagaaaacgcatggatactgaagtcgtatggcattcattataatagaaaacattggaattcgcaaggtaaagcaaaaaagttgaccgaaattttatgaaaattaaacgagaagttatggatgattttgtccagcatgcgaaatgactggaaacgtttccataaaatgttcacaaagtgatggaaattgtactataaattgtcgttgaaatcagacattaataacacataatagacaaaagctttcgagtgaaatgcgaattggaaatttgacattcaggttgatgtatgataaaaatattccaatccaaggaggttgcttaaatgaacgagaagaatattgtattaaatagtgtggaagcggcaaaagaatttgtgaaagctgcttctgaatgtgattttgatattgatgtctattttaacagaattgcattggatgccaaatccctgcttggtattctcagcctggatctgagaagcaagctcagagtctgctacagcggagaaaacgccggatttaatacagttctggcaaaatatgcggcataattatcgaagcgtggatgtttgaaaagaaactgctgcctagggcggcagtttttttctgttttatgcatttttttgttgataaataaatcatttacagttatactagatataacgcttttttatcaatatgcgaatgtatgttgattgttctattataattaagataacaggtgagtgtatgtatcaaatcgttgcaacagacggcagagcaaagagcgcacatatggaaaccgtacatggtgtcattgagacacctgtttttatgaatgtcggtacgatcgcagctatcaaaggcgcagtagcgacaacggatctgaaggagatcggtacacaggtggaattatccaatacctatcatcttcatgttcgtccgggggaccagattgtgaaacagcttggcggcctgcacaagtttatgaactgggacagaccgattcttacggattccggcggctttcaggtattctctctgaaaggactccgcaagatcaaggaagagggcgtttatttccagtcacatattgatggtcataagatttttatggggccggaggagagtatgcagattcagtcgaaccttggttcaaccatagccatggcgtttgatgagtgtgcgccgtatccagctacaagagagtatatgatcaactcagttaaccgtacaacccgatggttggagcgatgcaagaagaagatgcaggagctgaatgatgcagagggaacagtgaatccgcatcagctgctttttggtattaatcagggcggaacttatgcagatatccgtgtgaaccatgctcgcacgatccgtgatatggatctggacggttatgcaatcggcggccttgcagttggcgagacacatgaagaaatgtatcgcattctggatgaggttgttcctgaactgcctcagaataagccgacctacctgatgggggtaggaacaccggccaacattctggaaggtgtggacagaggtattgatttctttgactgtgtttatccgtcaagaaacggacgtcatggacatgtttataccaaccatggcaagctgaatctttttaatgcgaagttcgaactggatgacagaccgattgaagagggatgtcagtgtccggcttgtcgcaattacacaagagcttatatccgccatctgcttaaggcaaaggaaatgttgggtatgcgtttgtgtgtattgcataatctgtatttttataatcatctgatggaagagattcgtcttgctatcagggaacacagatacagcgaatttaagaagtctaaattggaaggctttttaagtaaagaagattaaggaggaatatctaatgaatttttcaccagtagttttaacaggcgcaggcacaagcggtatttttgttttgatcgcttatattgcagtttttgcagttttaatgtatttcctttctgtacgtcctcagaagaaacgtcagaagacaatggatgcaatgatcgcaaatcttgcagttggtgacagtattctgacaacaagcggtttctatggtgttgttatcgacattgcagaagatgttgttatcgttgagttcggcagtgacagacattgccgtatcccaatgcagaaagaagcgattgtcagcgttgagaaggctaatgacgaagaataattgaatcattacaaacgattgtacaaaggtgtggagatcataaatcggtttccacaccttttttagttatattttacataaaatttattaaaaactgatagtaaggtaccttatatagtttataataagaacggagataattgataaaaaattgagcggccggcagagaatgggccggtgagaaggaggttcaaatggaacaattaagagcaaaaaaaggttttattattgatatggatggtgtgatctatcatggcaatcgtctgctcccgggagcgaaggagtttgtagaatggctgtatcgtgaggaaaaggaatttctttttctgacaaattccagccgttatacaccaaaggaacttcagaagaagttggagtggatgggacttgatgtggatcaaagccatttttatacaagtgcgctggcaaccgctgcatttatatcaacgcagacgccggaggcaaccgcttatgcggtgggggaacatgggcttcagaatgccctgtatgatgccggcattacagttaatgagattcatccggattatgtgatcatcggtgaagcggataattattgctatgatcatattgttaaagcaacgaaatttgtcaatgacggtgcccgcctgatcggtacaaattatgatctgaccggtcctgtggaaggcggcattgttccggcctgcagagcattaatggcaccgattgaactggcaacaggcaaacaggcttattatgtgggcaaaccgaatgctctgatgatgcgtacgggactcaggatccttggagtgcattcagaggatgcagccatcatcggagatcgtatggatacagatattgttgcgggtatcgaatccggtctggatacggtgttggtactgtcaggggtaacaacaccggggatgatcgaggaatttccgtatagaccgagattggtatgcaacggcattggcgacattgctgctttaggcgactaaacagctgcagatgtattgggtcaggctctcagcttttcaagaatatcataaggaacgacgagacggcctttgccggtaccaatctggatatgcggtttataagtaccgtgaaaatctgaaccaccggaatacttgaggtgataatggttagccagatggctgagataaaggtcgtcggaaggggtattggtggagtagtagacttccatggcttccagtccccaggtggtcatcatcttgacatatttctcaagggtgtttttgccgagcttatagagcatcggatgggcgagaacggggattccgtcagcctgtttgatgagttcgatggcttctttcggagaagttttggtgcggggaatataaaatggcttcccgtcaccaaggtatcggtcaaaggcttctttgatgcttttgacaaaaccaacagacaatagataaccggcaaagttggcacgggtcaaaacaccgatgccttctttggcgtgaagtttctcaagggtgatatccacaccggcagcctgcatacgggcaaccatctgattgttgcggtcttcccggatctgctgcatgcatgccatggcggtttggaaatgcggattattttcattaatatcaaggccgacaatgtgaaattcggtcttgtccagccaggtagccagttcaacgccgtgaacaagttcaatgccgatttcattggctgcctgttgagcctcggtaagccccacagtggtatcgtggtccgttaaagcaactgcacgcagaccgcatgacgcggcatggtgaacaagctctgaaggcgtcatactgccgtcagaagccgtagagtgagtgtgcaaatcgattctatccataagttctcctttcaagttgatatagagatatatttatgatgtctgttctattgtaagacatttatggataaaaagccagatgtctttttggtggatatggggcatatattttatggatcatgttgtactgaggaatgattttgggatggataagaagttgggtgcggtgtccggtgggctggggattgtgcgtgtgatggcagctgcatggctgatcagtgtgatgatttcggccgtgggcatggtgctggcgtcattgattttctatgcagtgggtgagggtcagaacagaatcagtgtttcggtgtacgtggtggttgtattggcggttttgatcggcggtatttatgccggtcatcggatcggatacagacgcttcctgtgggggctggcgctgggagctatatattatgtcacactctgcctgatttcagtggtatccggatgtatggctgccgccgggtggcagttctgtctgccttttgtgttgctttgccttggcagcgggatgttgggaggaatgcttggataagcgacttttgaaaaaggtccggcagttttttagttggaatgcagaaagaaaaatcgttgttttacacagagaatgggttggatttagtaaaaaaatagaaattatttcatataatgcacgtatctttttaaaaagagctttaaaaatgcaaatgagtatgttataatatttcaagttcataattgaaggaggagtacataatgaaacgtatcaaatcattgaacaccagatctatgaaacagagcatggtcaaaggcggatgcggcgagtgccagacttcatgtcagtctgcatgcaagacttcctgtacagtaggtaatcagagctgcgagaacaacaaataatcagacctgattgctgattgattcagccaatattatgagcagcggtttagggttttctaaatcgctgcttgttcatgttgaaggaatgttttgactattcggggtcaggaatttatgacagctgattccgagcagatgcaaagttataaagtagaagtagaataagagagttaggagaatgtaagtgattcaccagtataagagtaatggttacaatatagtcatggatatcaacagcggtgccattcatgtggttgacgatgttgtttatgatattattgagttatatgaaggccatgagaagtccgagattatggatatgcttgcgtccaagtatccaaaggaagatatggaagaagcatttgaagagattgagactttaattaaagaagaaagtctttttacagaagatatttataaagattatattattgattttaagaagagaaagacagttgtcaaagcgttatgtctgcatatcgcccatgactgtaatcttgcctgtcgctattgttttgcagaagaaggcgagtatcatggccgacgtgctatcatgagctatgaagtcggcaagcaggcactggatttcctgatcgccaattcaggcaacaggcggaatctggaagtggatttcttcggcggcgagcctttgatgaactgggatgtggttaaacgtctcgttgagtatggccgtgagcaggagaagattcatgacaagaattttagattcacgctgacgacgaatggtgtcctgctgaatgatgagatcatggaattctgcaataaagaaatggcgaatgttgttctgagtgtggatggacgtaaggaagtccatgacaatatgcgtccgttccgcaacggcagcggcagctatgatctgattatgccgaagttcgagaagtttgccgagagcagacatcagacgaattattatgtcagaggtacatttacgcatttcaataaagattttgcggcagacgtgctgagtcttgcggataaaggatttaagcagatttctgttgagcctgttgttgcacctgcatctgagccatatgcaatccaggaggaagatcttccggaactttgtgagcagtatgatctgttggcgaaggaaatcgtgaagagagaccgtgcaggcaaacatttcaatttcttccattttatgatcgatctggaaggcggtccatgtgttgccaaacgtttgtcaggatgtggttcgggtacagaatatcttgctgtgacaccatggggtgatttatatccatgtcaccagtttgtcggtcaggatgaattcctgatgggtaatgtctgggatggtgttgtcaagacagatattcgcgacgaattcaagctttgcaatatttatgccaaggataaatgcacgaattgtttcgcaaaattctactgtagcggcggttgtgctgccaactcatggaatttccaccattcgatcacagatgcgtatgatgtgggatgtgaactgatgcgtaagagagtggaatgtgcaattatgattaaagctgctgcggcagatgaagaaggagaataaaggcatgaagagtaagaagaaaagctggcttgtgctgatcgtggttgttctgatgatcgcagcctgcggttatgtatctgcatacggatatggcaaggatcatatcggtacagccaaaaacattaagcttggtcttgaccttgcaggtggtgtcaacatcacctacgaagcagacgaagacaatccatcctctgaagatatgaacgataccgtttacaagcttcagcagagagtagaggcatggagtacagaagcagaagtttatcaggaaggcacaaaccgtgtcaacgttgatattcctggtgtttatgatgcagagaagattctctctgaactgggcaaccccggttctatcagtttctgtgaagcaaagtccgatgcggcaacaggcaaggaagtattagatggttactgtgaagttgtgggcggcgaaggcatcaagagtgctcaggctacatcccagaaagacagctatggcaacacacagtacgtggtttctctgatgtttacagatgatggcgccaaagcttttgcagaagcaacagcaagaaatatcggcaaaccgatctacatcatctatgacggcaagattatcagttaccctactgttaatcaggcgattacaaatggtcagtgtgtcatcgaaggcaattttacttatgatgatgtgaattctctggccacaactattcgtgccggtgttctgaagctccagctgaatgaaatcagttccaaagttgtcagcgccaagttaggtgatgaagcagttaagacaagtttgatggcaggtgccatcggtcttgcgatcgttatgttgtttatgatcgtcgtgtattggatccctggtgtggctgcagcccttgcactgcttctttacgtggcagcaatgctctgcttcctaaatggtctggatgtgacactgacactgcctggtatcgccggtatcatcctttccgtcggcatggcggtggatgccaatgtcattatctttacgcgaattagagaagaaatagcagcaggcaagaatgtgcgtgaagccatcaagattggtttcggcaaggcactttcagccgttatcgatggtaatatcacaacattaattgcagcagcagttctgtatctcaaaggtacaggtacaatcaaaggtttcgccattacactggcccttggtattgtgctttctatgtttacagccctcgttattacacgattcgtgctgatggcattatatggtattggttttaaagatgccaaattctatggtaagcagaaggaagcaaaggttaagaacttctgcggcatgaagaagatcacttatgtgatcgccgtgatctgtatctgtgcaggtttcgtcagcatgggtgttcatgcttctgcaggcaataaagcgctgaattacagtctggactttacaggcggtacagccatgactgtcaatttcaaggattatcttgaagtccctggctctgatgaagatgatctgagaaaactctttgaaagtgaagcaggtacaactgatattcagttccagaatgtatccggttcacctgaaatcgttatcaagacgcctgttcttgatcctgagcatcgtgcagctgttaaggacgccttaatggagaagtatgctcttgaacagtctgatatcactgaagagaatatcagcggtacaatcagcggtgagatgcgtacaaacgcgatcctttccgtcattatcgcaggtatctttatcatgatctatatctgggttcgattcagagatatcaagtttggtgcaggtgcgatcatcgcattgctccatgatgtactggtcgttcttgctgtttactcaattgcaagaatccctgtaggtacaacatttattgcttgtatgctgacaatcgtcggttactctatcaatgcaaccatcgttgtatatgaccgtatccgtgaaaactcacatacaatggtgaaggcaacaacagaagaaattgtcaacacaagtatcagccagacattgtccagaagtatcaatacttctctgacaacattgatcatggtattactgatctacatcatgggcgtaacttctattaaagaatttgcattgccgatgatggccggtatcattgcaggtacattttcatcagtattcatttcaggtacgatctgggctgttatgaaaggcaagaaaaaataaatatatttctttatgaaaggactgctgcactgcggcagtcttttctgattagattattgactgctgattgggcaatgcgttgctttttgaatcatgtatcaaatcgacgattcaaagcaggcacgttcgcactgcctgacactggcagcggtacataaggtgctgaaggacagcacctaagtaccggccgtgtcagaagcatctgcttttgaatgcgccaatttgatacatgataccaagtaaaactgaattgcccaatcagcagttcaagtatatcgaagaggcagaaaagacagccgcagtgcagaaagtcctttcaaaagaaagcttagacaccgacggcgggataggatatatttattttagaattcgaggagttatggaattttgatttgaagaccaggcaattgcaaaatcaattttctgaggttaaccatatccaatccaagcttcattgcaggtgcttccggtacggctggtccttagacgctattctttagcgtcttagtaccactgccagtgccgggcagtgcgaacgtgcctgcaatgaagcttggattagatatggttttcgagacacatggattttgcaattgccgtctgcagaagagaggtgtttttttggttccggaaagttacagatgggaatttataaagcaggaaagtgccggtgtgaagcagctggcagcagagactgggtatccggaggtgtttgcagggttactggcggcaagaggtgtgcataataaagaagaggcacagcggttcctttatccttcagaaaagaatatgtacgattcattcctgatgaagggaatggaggcagcagtctgccggatcagccaggccatggatgcccatgagaagataacaatttatggagattatgatgtggatggtattacagccaccagtattttatatttatacctgagtaaagccggtgcagacgtgaattattatctgccggaccgcatgactgagggatatggactgaatgaaaatgctgtgcgcatgctggcggagacggggacaaagctgatggtgacagtggataccgggatttctgctgtcaaagagtgtcagttggcaaaatcattggcgatggatgtgattattacggatcatcatgaatgccaggagaagctgccggaggctgtggctgttgtggatgcaaaacagccgggagaaagttatcccttcctttatctggcgggatgcggtgtggcctataaactggtacaggggctgaaagattacagaaatgatcagacggatattacagaatacctggagcttgcggctgtcggcacagtggcagatatcgtaccattgtatgatgaaaaccggatcattgtcagtgaaggatttaagcggataaaacaccctgccaatatgggacttggcaaattgctggaaagtgccggatatgactttaagcgtaagataaccagtggatttatcggtttcgggcttgccccaaggctgaatgccggtgggcgtatgggggatgccaaaagaggcgttcgtctgtttacgacgagagatgaagaggaggcagcagcaattgcagctgagctggaggtggagaacagtcatcgcaaggaaacggagcagatgattttaaaacaggtgacagaccggatcgaggcatctgatgcaatcagaaacagccgggtgatggtggtagccggcgaaggatggcatcatggggtcattggtattgtttcatcccggattaaagatatgttttatcggccgaatattttgctgtctatagaaaatggcgtggcaacaggttctgccagaagtatagacggattcaatctttttgaagccctttgtacgtgcagtgatctgatgattaaattcggagggcatgcagcagcagcaggaatgtcattgaaggcagaaaatgtaccggaattgtccagacgactgaatgaatatgcaaaaatgcatatggacagccagatgctgacacctgtccagcggccggaattaaagcttcagccgtcagaagtaaccatagaactgattgaattgatccagagaatggaaccctttggtcaggatatgccggagcctctggcggaaatttccggacagctgggtgaagtcagaaaaatcggtgcagaccgggcgacactgagaatgacggtaatggaccggagacgcagtctgaatacagtgggatttcgccgaagcatcatggcggattactatacagccggcatggaggtatcaattgccggaaatctggatataaattattatatggacagacagtatcctcagatgattctgaaggatgtcaggattgctcaggatgacaacctggaaaaacttcagcatatttttgcattaagacatgtgacggatgattacaggctgtattgtgatgccagggacaagctggataagtcagtgtgcagtcaggtttttcgtttccttcagatgcagatgaagaaacaggggaatgagaccgaaggcagttttatgatggaagatatcccatttgacagcatacattcagcggaggaacatatatttatgctgatgcaggcactgtatgtctttgaagaactgggacttatgcgggttgaaacggcaggaccgtatcttcattatgaaatgatcccgggaaaaacagctaaattgatggattcaatgtggtacaggacgtattttgtcgatttcggggcttttcaatagaatcatttattgttataattaaatttatacgtgactgcccaaggttcgggcagctgcgatgaatttgagaagacaaatattcatatagaaggagcagtgagtcttatgaaaaaattagaagaatatgtcaagagtattcctgatttcccggagaagggaatcattttcagagatgttaccagtgttttgcaggatgcggagggacttcacttggccatcgaccagatgcaggagaagttggaaggtgttgatttcgatgttgttctcggaccggaatcccgaggctttatttttggtgtacccattgcctacaatatgcataaggcttttgtgccggtcagaaagaaaggcaagctgccgagagcaacgatcagccagacatatgatcttgagtacggcactgcgactattgagatacataaagacgcaattcagcctggacagaaggttgttattatcgatgacttaattgccacaggcggcacaacagaagccattatcaagatggtggaagaacttggcggagaagtcgtcaagattgttttcctcatggagctggcaggactgaagggccgcgagagactgagcggctatgatattgattcagcgattatctacgaaggtaaataatgacagaagaggatgacgcaatatgaaggacgataaaaaagaagtaatgggcactgaagagccatttgaggagcaggagctcattcatacacaggatttcgaatcaccggaggtgctgtatcagcgcctgatcaataaagtgaaggaatatcatccttcagatgatatcagtatgatcgagaaggcatataatattgccaataatgcgcacaaggggcagctgcgtaagtccggagaaccttatattattcatccgctctgtgtagccctgatcctggcggatcttgagctggataaggagaccattgtcggcggacttcttcatgatgtggttgaggacacaatcatgacggaggaggatatcacgagagaattcagcgcggagatcgcactgatcgtatccggtgtaacaaagctgggacagttatcctattccaaggataaggtggagattcaggcagagaatcttcgtaagatgtttctggctatggcgaaggatatccgagttatcctgatcaagctggcagaccgtctgcacaatatgcgtacactgaagtatatgacaccggccaagcagaaggaaaaggccagagagaccatggatatttatgcaccgatcgcccagagacttggtatttccaagatcaagattgagctggatgatttgtcgttgaggtacctggaaccggaagtgtattatgatctggccagacagatcaatctgaagcgcagtgagcgtcaggcttttgtagatgccattgtggaagaagtcagtcagcatatggcacagagcggtatcaaggcacaggtgaatggtcgtgttaagcatttctttagcatttacaagaagatggtcaatcaggacaagacattggatgagatctatgatctgtttgcggtgcgtattattgtggatacagtgaaggactgttatgcggcccttggtattattcatgagatgtacaagccgattccgggtcgttttaaagattatattgcaatgccgaagcagaatatgtatcagtccctgcatacaacactgatcggtccgaacggacagccttttgagatccagatccgtacatttgacatgcacagaacggctgaatacggtatcgcagcccattggaagtacaaggaagatccgaatgccaagaatgtagaggacagtgaggaagccaagctgacatggctgcgtcagattctggaatggcagacagatatgtcggacaataaggaattcatgagccttttgaagaacgacttgaatctgtttgcagacagtgtttattgttttacaccggcaggtgatgtcaagaatctgccgacaggttccacaccgattgatttcgcttacagtattcattcagcggtcggcaataagatggtgggggcaagagtcaacggcaagctggtcaatattgattatgtgatcaagaacggcgaccgtgttgaggtcctgacatcagccaattccaagggaccaagccgtgattggctaaatattgtcaagagtacgcaggccaagaataagattaatcagtggttcaagacggaattcaaggaagagaatattatccgcggtaaggatatgctgaatcgttactgcaaagcgaaagagatcattctcagtaatttgctgaaaccggaatttatggagaaagttatccgcaagtatggtttcaaggactgggatgcagtcaatgctgctgtgggtcatggcggtttgaaggaaggccaggttatcaacaagctgcttgaggaataccagaagaagcagcgaaaagagatgacagataagcagcttctgacacagatgactgagatgaagcagaaaccgtctgcagccgtacagccgcataagaaaggcagcaagagcggcattattgtcaaaggcatcgatgatgtggctgtccgtttctcaaaatgctgcaatcctgtaccgggtgatgagatcgttggctttattaccagaggcagaggtgtgtccattcatcgtacagactgcgtcaatatgctgcatttatccgagatagaaagacagcgcctgattgatgcagaatggcaggacagcacggctgacggccagggcggcctgtataaggcagaactcaatgtttatgttcatgacggagtcggtgtgctgattcagatcgcacaggtattctcagagagggatatcaatgtgacagccatgtccagccgttcaggcaagaataatacagcgaccatcaatatcagctttgatattggcggcaagtatgctttaaataagattatagacaaactgcgcagtctggactgcgtttatgatatcgccagaacaactggctaatgaataaggagcagagaaatgggtcagatagagattaaatcaatgacactcggtatggttgcgacgaattgctacctcattatcaacaaagagaacaaagaggcactccttgtcgatcctgcggataatgcattgagaatcagcaatgtgatcgaggaaaacggctgtacactgaaagcaattcttttaacccatggtcattttgatcatattatggcattaaatgatttgaagaagagatacaatgttccggtttatgcccatgaagaagaagaggatgttctgaagcagtcctccttgaatctcagcggttcaatcggacagatttatacaacacaggccgatgtctatgtgaaggacggagagcatctgaagctggcagggctggatgtgatcgttctgtatacaccgggccatacaaagggcggtgcctgctattatttcccagaagagaaggttttgatgagcggagatacgctgttccattgttccatcggacgtacagattttccgacagggagtatgtcacagcttgttcgctctgtgaaagagcagttgtttgtactgccggatgatgtgcaggtatatccgggccatgacagtgtgacaagcattggatacgagaaacagtataatccatttttttaggtgaaagcgaacagcgattgacagggctgctgcaggactgatagatatcggttttgcagcagccttatctcagtcattgattttggctgggaacagtaatttaaatgcagatggaatgggaggattttgatgattgcattatctatgaatcgaacagattatgaaaatgatattcgatcccttttgatggcattcttctatggtgagaagattgtattgaatggggaagaatggaatgtctgcctggatgttcggtatacagaaaatcataccgctttggtattaaaagatcataatggcagaagtcttgaaaaagagggcgactgtcattttgaagattatcgtttgggaagaaatgatatcaagaaccttgtctatcgtcttttgtcggaatatacggggatggtgctgccatgggggacactgaccggtattcgaccaacgaaactgcccatggagatgtatgaaagcggtgcgtcaagggcggatgccattcactatctgaaggatacctatcttgtttctgatgaaaaggcatcgctttgtgcgattgtagcggagaatgaagcgaaggttttgaaagatgttgattatgatcatacattcagtttgtatgtggggattcctttctgtccttcaatttgtgcctactgttctttttcatcgtatccgttatctgtctgggaaaagcaggtggataactatttggatgcattatgtaaagagattgaagcggcgtccactatgatggggaacaaaaagcttctgactttttacatgggcggcggcacaccgacatcactttcagcggctcagatggaccgtcttctgacctgtctggaacaatattttgatctggcgcatgtcagtgagaaaactgtggaagccggaagaccggacagcattacggaggataagctgaaggtactgagaaaacaccatattgatcgtatttcgattaatccgcagacgatgaatcaggaaacactggatctgatcggcagacgccacacaacagaagaagtgaagcaggcctttcatatggccagagaagcaggatttatgaacatcaatatggatctgatcgcagggctacctggggagacaagtgaacatatgcagcggaccatggatgcgattgtggatctggcaccggacagtgtgacggtgcattccctggctttgaagcgcgcggctttcctgaatcagaacagagagcagtttccggttgcgggagctgatgaggtgaacagaatgatcggtatcagccatgaaggtgcgctggccatagaggcagaaccttactatttgtaccgtcagaaaaatattgcgggcaatcttgagaatgtaggttatgccagaaaaggctgcgagggcctttataatattctgatcatggaggagaaacagacaattcttgcgctgggtgccggtgcatcatcaaagtttgtttttcacaatgagcatggacatcgcattgaacgtgtggaaaatgtcaagagtgtcaaagattatattgagcgtattgatgaaatgatcgacagaaagaagaattttcttttaaaatcggaaaacagcttttaattcggcggcggatgtggtatagtggaagttgcctgattgataattagtgccatagaaaagtgcacataggaggtaaaaatggacgttattgaattaaagaaaattgccaatgaagtccgcaaggggattgtgacatcggtacattctgcaaaggcaggacatccgggcggttccttatcggcagcagacgtatttacgtatttgtattttgaggagatgaatattgatcctgcagatcctaagaaagcagacagagaccgtttcgttctgtctaagggtcatactgcacctggactttattctgtattggctcagagaggttatttccctgtagaagatctgaagacactgcgtcacatcggttcttatcttcagggtcatcctgatatgaagcatattccgggtgttgatatgtcttcaggttcattaggacagggaatttcagcggcagtcggcatggctttatcagctaagctcagccatgatgactaccgtgtttatacattactgggtgatggtgagatccaggaagggcaggtttgggaggcttccatgtttgccggccaccgcaagttggacaacctggttgtgatcgttgataacaatggccttcagattgacggcaatattgcagatgtctgctcaccatatccgattgacaagaagtttgaagctttcaatttccatgtgatcgcagatgtggatgcccacgattttgaggcattaagagctgctttcaaggaagcaagagagacaaagggcatgcctacagccatcattctgaagagtgtgaagggcaagggcgtatctttcatggagaataaagccggatggcatggcaaggctccgaatgacgaagagtatgccatcgccatggatgaattagagaaagcaggtgaagcactgtgtcagaagtaaagaaaatcgctacaagagaaagctatggtcatgctctggtagagcttggcaaggaacatgaagaggttgtcgttctggatgctgaccttgctgaagcaaccaagacaggtatttttaagaaggaatttcctgaaagacatatcgactgtggtattgctgagtgcaatatgatgggtatcgcagctggtcttgctgcaaccggcaaagtgccgtttgcaagttcttttgcaatgtttgcagcaggccgtgcttttgaacagatcagaaacagtatcggctatccgcatctgaatgtgaagattggtgccacccatgccggcatttctgttggtgaagatggtgccacccatcagtgcaacgaggatattgccctgatgcgtacaatcccgggcatggttgtgatcaacccttctgatgatatcgaagcaagagctgctgtaaaggctgcttatgagcaccagggacctgtttatctgcgtttcggccgtctggcagtaccggtcatcaatgaccgtccggattataagtttgagattggcaagggcgttgtcttaaaggaaggcacagacctgacaatcgtggcaacaggcctttgtgtcaatgaatctctggcggcagcagctaagctggaagaagagggcgttcatgcacaggttatcaatatccacaccatcaagccaatcgatgctgatttaattgcagaagcagccaagaagacaggcaagatcgtaacagtagaagaacactccgttatcggcggcctcggcagcgcagtttgcgatgtattatgcgagagagaaccagtgaaagtactgaagatcggcatgaacgatgtatacggtgaatccggaccggcagtcaaactgcttgaaaaatacggtctggatgcagcaggtatttatgctaagattaaagcctggttatagaaagaggcttcgcgctaatagataaacgaagtacggtttagagtacttataatggaattagaatgagtctactcacacaagcacgtttgcactgccatcgtttggcaatggtacgtaaggcggcaaaagacgccgcctaaggaccggccaacgatgaagcacttgtgtgagtagactcattttaattccattttcaagttattagaccgtactatctttgtgtattaagcgcgaagcgtttatataaacaaatgattgccacattagagttttttatattgtctgaataagcaaaggacggctaatacaacttgaaaaagaattgctcgatcttttgttaaaatcccagaaactgttcatctttttgtttggttaaatcataaatggagcgctccatcaattattcagccgtacgaagcgttttattcgtcggcagagaactggtacacagttgtatagcgatattcttttctaggcttcagtaccggtgacgggaattcaggatggttgagcgcatcagggtagaactgtgtctcaatagcgatgccgtcatagtgatggtaatctgtaccggctttgccttctgattcggagatgaagttgccggtgtagatctgaacaccgggcatatctgtactgacatacatcttaagtcgtgtctttggggacatgagtgtgcagcatggacgcatgccgtcgccgtcaatgcagaagttgtggtcatagccaccggccagtttcaactgtggatgatcggcattgatatcctgaccaagggttttgcctttacggaagtcaaaaggcgtattctcaacgtctaaaagctttccagttgggatcagatgttcatcaacctctgtgaaagaagaagcgtagagttccagtgtatgatccagaatagagccggcatcttctccggaaaggttaaaataagtatggtttgtgatgctggcaatggtatccagtgtctcagagttgttccagcctgtgtagttcataacaaaattgtcacagtcatcaaatgtatagctgacgatgaacataaattcaccgggataaccttcttcgccgtcaggtgagatacggccgaaagtaacggtatcatcactgtcgatcttggctttgaacatttgcttgtcaaaacctttcaaaccgccatgaagatggttctcaccttcattggctgccagtgtataagtctggccattcagagaaaaactgcttccgccgatgcggttgcccacgcggccgatacaggcccccatgaagtctgtgtgttcttcgtattctgcaactgtattgtaaccgagacagcagtcgataacttcaccctcggcgtctacaatattgatagactgaacagtggcaccataatccataatggaaacggagttgcccattttgttggtaatcgtatataatgtgacaggctcaccatctttggttttgccgaatttgcggcgtgtaacgctcatttctttcacctcatcttattcgtcattacaaaatagttcctagattattatccaaaaaattttgcaaatgcgtgatatattcagtaaatagtataatacattttaaggtaaaaatccagtttattcgtctttgaattggcgccctgtattgtccatatgatattttcctgtgtagattagctgggagattgggacgatttcataccctttgtcctgaagacctgtgataacacgctccaatgcgtcttttgtgtatttggcaccattatgcatcaggatgatagcgccgtctccaagcgctttgtggtttaatatggtgtccacgatgctgtcagcgccgtagtctttccagtccagactatcgacagaccattggatcacatggtagccgagagcgttggcagattcgatcaatgtgttgttgtagtcaccgtaaggaggcctgaaaagtatcatttctgttccggtgagttctttgactttatcgtgaggtttttgaatttcagcgagacattcatcggaagagagctgagacatctgtttgtgattttcggaatgatttccgagatcatgacctgctgcagcgattttctttacatcttcgggataagattcaatccagcctccggtcataaaaaatgtggttttgacattgtatttgtcgagaatggaaagcagggtttcggtatcttcattgccccaggccgcgtcaaaagaaatagctacctgaggtttgtcggtatccacacagtaaatcggcagcttcctttcaaaccgggaaaaaacagggagagaggataaggctggtttgaaatgatgaacagcagcaagacagagaagcagaaatatacagaccacacagcctgttttaaggaagagtgcgagtgtgtgtttcatggcataataactccatggaggtttgtgataatatatgatgcaaaaaaagccggtatgcataaagcataccggctaaaaaaactcatactgttatgtatggctgattatttagcaagacccatgagctcatctttgaagattctttcatccataaccttaacatctttgatgataggtttgaagtccatatgagcaaggatatctttctcaatatcaagacctggagcaacttcgatcagttctacgccttcttttgtaagtttgaatacgcagcattctgttacatagagaaccttctgacctgtcttgttagcgaagtcagctgagaatgtaatctgttcaacatctttaaggaatttgttcttgcctttaactgtgaaagtaccgcagaatactacaacaggagtgttctgagtaatgttgatgaaaccaccgcagcctgcgatcttaggaccaaacttggatacgttgatgttaccatggctatcgcactgagcaagaccaaggaaagcgatatcaagaccaccgccatcatagaagtcgaactggaagctctggtgaaggattgtatctgggttagttgtaacaccgaagtctccgcctgaagcaggaacaccaccgattgtaccggactcagttgtaagaaccataccttcgatgccttcttctgctacgatattggcaacaccttctggcataccgataccaaggttaacaacagcaccagctttaagttccattgcacaacgacgagcaatgatcttacgagcattcatcttcattggttccatagcagacatagggattctcttctcacctgagaaagcttcattgtggtaagaaccatttgtctgtttagcgcagtcgctgtcaacaagaacgattgctgcgatatagataccaggaacctgaacaaaacgtgtatcaagagaaccatattcaacatagtggctcttctcaacagtaacaataaccttaccgcctgttgtataagctgcctgagcaattggaaggatatctgcaagagtaccttcttcttcaagagaacagttaccctgtgtatcaacataagatgcatggataagtgctacatcgatagggaagctagggtagaagagcttatcttcgccgttgaagttgactttcttaacatagctgccttcttcacgtgctttatcattcagcataccgccttcaacatctgggtcgacgaatgtgttaagacctacatgtgtgatcagacctggtctgtgagctgcgatttcacggaataattcggagatacagccctgtggcatattatatgcagcaattttattttcaagagcaagtttctggattcttggagccagtgaataatgaccagcgataatcttcttaagaagaccttcttcaccaaggtggttaacctgtcctaccacattaccttcagcgtctgcaccgccgccctgaccagctgcatgtacaagtgtgaggtctcttggtgtaccttcttcaaggaatgatttctggatcgctctcatcatgccctctggctgtactgcaccaacgaaaccattagtagcgattgtcataccgtctttgatataggcttttactgcctcttcggctgtcattaattttgccattttaaagttcctcctttttatctgtatcaattacatgcgtaacagatacctatctgctcttctattataatgtaaattagtacaatttgtaaatacgtcttttttgataaaatggaatagactcatgccgaatatgaatattatcaataaaaacatccaaaagggagatttgaaatatgtagacaataactaaaaaacaggggttgacaaaaaataaacaactttcaaaaatggtgaaaaatactaagaacaagcaaagattatgtatgaataatataacatatgacgaattattagtatgcaaaataaatttcaaaaagggcatgcagcagataaaagatagttaaaacaagggcaaataatgagtattccgtcgttttatgtggcaatttgacgataaatagattataataggagagtaagtgtgtattattgttaaataagggaggaactaatgtggatctgaaaatggaagttactcagactctcggattatcacaacgaatgattcagtcgacagaaattcttcaaatgagtgctcaggaactggacacttatctcaaagaactggcggtggagaatccggttgttgatatagaagagaagtttgataagtcaggggaatctgagcgggatgcggagctgcagaagaagttggaatggcttgcaagcagtgacgaacagaatcgcgtctattattctgaagagtacagcagtgacgatgatgacaaccaggatatgtggaatgtcagtgacaacagaggggaagatttggcggagtacctgatcagtcagttggtgaccattcctttaactgataaggagcaggcaattgcggagtatctgatcgatctgttggattccagaggttatctgacggaagaaacagatcagattgctgtccagttggagacagaagaggatgaagtagtccggatgcttcaggttgttcagagcctggaaccggccggtgtgggcgcaaggaatctcagtgagtgccttttgattcagatggaccgtcagaagattgaagatacgattgccaggaagattgcggcgaattacctggaacagcttggcaagaatcagctgcctcagattgcaaggaagctgaaggtgacggtggatgatgtgcttcaggccatggaagtgatccgtgaattgaatccgaagccgggtaatagtttcagttccagagagaatctgaaatatatcacaccggatgtaacggttgtgaagctgaaggattattatgagattttgctgaatgaatatatgtatccgaagatgtctattaatggatattaccgcaacatgttaaaggcaggcaatgacaaggagacgaaggattatgtcacaacaaaggtgaaacaggcagaatgggtgatgcagtgtgtttcacagagaaatgtgacgttgatgaatgtttcaaagtgtattgtggatgtacaggaacgtttctttacatatggtccggggtatctgagacctttgaaactggcggatgtggctgagatggtaggaatccatgaatccacagtcagccgggcagtgaaggacaagtatcttcagtgctcatggggaattttcccaatgaactatttctttattggtgccatcagcaaggccggtaatgagaatgcggcaacagctgatacagccaagaatcttctgaaagaaatcattacggatgagaaccacgagaaaccgtacagtgacagaattttgtctgagaagctggcggagagaggtgttaagatatcaagacgtaccgttgccaagtatcgtgaggcaatgggaattaaagatgccagtggcaggaaagtcttttaaggctttcactgccgctggcagtttttttatcttcataaagttattggacatgtattgtttctttctgtttaagaatattcacttctttaacaacaagataaatggacagcagggctgctgccagatcggcgcatggaccggcgtacataataccgtcaatgcccatgatatacggcagcaggataattaagggcagcagaaaaagaatctgtcttgtcagtgacaggataatacctttctgagctttacctacagctgtaaagaagttggaggcaataggttgaagacagtttacaaatgtgaaaaacagataaatgcggaaatattcttcagcaaaggtaaaataatcttcactgccgctgccgaacaggctgataatctgccttggcaggaactggaacagcagaaaagagatgatcgatatcacaaaacctgcttttaaggccagatgcaaaactttacgcacccgtccgtaattaccggcgccatagttgtaactggcgattggctgcatgccctgagagataccgatgatcatggagaaaagcaccatattaaccttggcgatgatgccggaacaggccagcggaatttcacttccgtaagaggaaagtgcaccataatgactcagggaattattcatgacgacctgtacgatcatcatggcaatctgattaataaaaggtgatgcccccaacagaacgatatacatgatataatttaccttcggttttaattcactcagatgcaggggtactgttttgaaatgacacatgtagcggattacaagaagtgccgagataatctgaccgataatggttgcataagctgcaccagccatacccatatgaaaaccgaagatgaacaatgcatcaagcactgtattgacgatagcccccaccagattgcagatcattgagaactgcggactgccgtcggcacggatcagatgaccgccgccagtggcaagaatcaggaaaggaaatccaagggaagtaatgccggtataagttctggcataatcaagaacctgatcggtagcaccaaaaagcagaagcatcggtgtcagaaaaagtcggacaatgatacagagtacaataccgcaggaaacaagcatcagaagtgcgttgcccatataggcagcggcttctttttttcgtccggctcccatagccagattaaaacgggcggcaccgccgataccaaacatcaggctgaaggcaacgcaagtgggggtcagaggaaaggcgatgtttgttgctgcattgccaagaagaccaatgctctggccgataaacaactggtcgataatgttgtaaagtgagctgaccagcatggcaataatacttggaacggcaaattggcgcagcaattgtccgatgggtttgtccgccatcgggtgagtagttgttgtcataaaagattcctcatttctttcaaaaattttttcgcagcaatctaattgttgaatagtaaactaattaaagacaatagttagtataacattggatgtattttatggcaaaggtaatttgtgaaaaaagtaattatttttgaagatttttaaaatacaacacgattaaaatgacgacgtattttaaatatatttatagaaaatagctattttattatagaaaatgtcatttaatacaaagaaatattgacagttttattgaaaaaaagtatactatacaaaaataggtcatacctatatgggtcgtaccaattttctatgacttaattaacggggatttttaggaaggaaatagaacatgagtgaaggaaatctgctgtctgaagaaattacacagcggttgctccatgagatcagagagggctgctatgcaaattgcagaaagctgccgccggagctgactttggctaaggagatgggggtcagccggacactgatcagagattgcctttccgctttggaaagggaaggatttatcagtcggaagcatggcgtgggaacgattgtgaatccgcatattctgaatgcaacgacaagaatggatcttgagaaagagtttcttgagatggtctcggatgccggttatgtgtcggatatgaagattgagcgtattgacaagattcctgcggggaaggaagtagctgcaaaacttcatatagaagaaggtgatctggtgctgatttcggaacggcttgtaacagcagatggacggccggcgatttactgtatggattatattgcggaggccaatgccaaagagggctatgatatcaagcttcttaaggagccggtgtttaagtttattgaacagtgctgtgaacaggagatttatatggatctgacggagatccgggcggttgcagccggtgaggatctggcagagattttgaatgtggacaagcaggcaccgcttttatatatggatgagattggatacagctttatgggagaaccgcttttgtattccagggaatattatgtggacggcattctcagtcataaagtactgcgaaagaagatataggaggaagttatgtatacagcagcaattatgaaaacagaactggaggcttcaaaaggcacacgtaaactggatatgcgtattgacaatatccagctggtgaatgtttttacacgggagatttatccggcctccatcggtatttataatgaaagaatcgtggctgttggacgtgttgaaacagaggcggatcaggtgattgacggcgcgggcgcttatgctgttccgggccttatagattcccatattcatatcgagacgacgcttctgacaccggaagctctgggtgaggtgatcattccatggggaacaacaacactttgtgtggatgccatggaaattgccaacgtggcaggtattgacggtctgctggcaatgatcaaggattcagagaagctgcctttcagactgcttcttgagatcccttccagagtacctacagcgcctggacttgagacaacaggcggtgtgttgggggttgaggaagtaacgcagctgctggaactggatgaggcagtgagccttggtgaactggatccttccaaagtccttggtatgaaggaagaatatttagaaaaggtactggccagcctgaacagacgtaagatctgtaatggccatgccattggactgagtgtggatgatctgaatatttacgcagccggacatctcagtgatgaccatgaatcagtttattatgaagagctgttagaacgcctgagacttggtattatgccgttgatccgtgaaggcagcagtgaacgcaatgtagatacactggtgccgggtattgtgaagaacaatctgccgacagacaatatgatgttttgtacagatgacaagcatgtcaacgatattttcaaggaaggccatatcagttacaatgtgaagcgttccattgaattgggactggaccctgtacaggcgattcagatggcaaccatcaatgcggctaagcattttcgcctggaagacaaaatcggttcagtggcaccgggacgtttcgccgatattcttctgattgatgatctgacaaccatgaagccgaagcttgtgttaaagagcggacgtattgtggcagacgagaatggtgcccgtccggtgcctgagaaagcttatcctgagaagttatttgataccgttcatattggtgcagatttttcagcggagaagtttatcatccattctgagggcaaacgtgccaaatgccgtgtcattgatctgatcaaggaccagattattaataaagagatctttgagtggatggatgtcaaggaaggacagattgcagcggatgtggacagagatattctgaagctggctgttgtcgaacgatacggcaaaaatggccgtgtttctacagctctggtgcatggttttggactgaaacagggagctcttgcagcttcggtttctcatgatcatcacaatattgttgtggtgggaaccaatgacagggatatggctgtctgcgtcgaaaagcttcaggaacttcacggcggttttgtttcggcagtggagggacaggtggttgacgcactggcattgcctctcggcggtctgatgtccactcttccggcgaaaacagtgatgaagcggatggatgaaatgaatggagcagttgagaagatgggatgcccgatgaaagcgccatttatgtcgttatcctttatttctcttccgacagtgccggaactgggattgacagattttggcctgattgatgtactgggccatcagattattgatatgatcgtagagacggaggcgtaacatggaaagttacacgggaaaaggccggggccgcgtggaaggcatggacaaggccaccggcagagcggtgtatgcggcagattattatgaggaaaatatgctgcatctggcgattgtccgatcagcgtatgcacatgccagggttttggatatcgatacatcgaaggtgcctgagacggcctgggtttttacagcgaaagacattgtgaagaacaatgttcaggacattctgccggatcagccgctgttggtggaggataaagcacgatttcttggtgaagccattgctgttgtggcagctgaatccgaagaagcagcaaaggcagctgcggcaatggtgcaggtgacgtacgaaccccttcaggttgtcacggatgcattgatggcagcaaaacccggctgtatccgggtgcatgacgatacagagaatgatgtgattcgttttgataacgaaaaaggcaatgtggcacaggggtttgctgagagtgatttgatccttgaagatgatttttatacgccgatacaggaccatggctatatggagccggacgcctgcatggcgaaaattgaggaggatgggcgtctgcttgtctgttcttcaacacagaatgtttttcatgatttgagaatggtctgtgatattacaggtcttacagaagatcaggtacatattgtagcagccactgttggcggcggtttcggtggtaaggacggcagtaccgcacagctgtttacagctcttgcggcatttaagacgagacgtccctgcaagcttattttcagtcgtcaggaatccctggcaacaacctataaacgacatgcggtctatatgcatgtgaagatgggctttaagaaagacggaacgatggtggcctttgacggcagcggttatctggatacaggtgcttacggcggcctggggccggctgtgttaagccttttttcagagcattttgcaggaccgtacaatattccgaatgtaaagatcagcagtcatctctgctataccaataaaccggtggctcatgccatgagaggttttggggcaccccagggcgcttttgcgacagaatccctgatcagcagggcttcgaaacttttaggtattgatccgttggaaatccgttacaagaatggtattgagacaggcatgtacggcggcgtcggacagaaaatgcgccatttcgtggactttaaaggggcactgaagctgatcgaacagtctgaactctggcaggagagaaaacacaatacggacccatatgtcggatacggcattgcaggcgggcacctaagctgcggtctcggcaagaatattccggatcaggcagaggtgaagattgaagaagcagatggccattatacaattttccttggtctggtagatatcggacagggaagccggacggcactgcaggctatggcggcggatgctctggagacagattttgacaatgtttcccttgtgatggcagataccgacagaacattggactgcggatctacagccggttcccgttccacatttatcggcggcaatgccatgctcaatgccatagagaattttaaaaaaggcgagatggaaacaggaaaggcagatttccctgagagtgaggaaagtttttccatcgccggtttcccacatgcgatgtatacatttattgcccaggctgtgaagcttcgggtggatcctgtcacagggcaggtagtgcttctggatattgcagcagcaacggaagcaggaagaattatcaatccgttggcgatggcgggacagattcaaggcggtgtggctatgtctgtgggctatgcctttggtgagaattgtcaatttaaagagggacgattgctcaatgacagtatgtctacgtatctgatgcccacggccatggatttgccgcggattcagagtctgcatgtggatggttatgaaccgtcgggaccgatgggcgtcaagggcgctgcagaggtatccaccgtatctatcgctccggcgatcgctgcggcaattaatgaggtatcagaaggcagattgaccagtttgcctttcgatatagaaactattttaaatggcttaaagaaatagccaaaggaggaaaagagatgaaaaaaggactcaaatggatggcaggacttctgacactggccatggttgtcggttcttttgcaggatgcggcagttcatcctcaaaggagacagcagcaggtgaatctgctgctgcaacaacagcagaatcaacagctgatacagcttcagcagaaacagcaggcaagaaattgaaagtggctttgattcttcctggcaaaaaagatgacgtatctttcaaccaggcaatgtatgaaggtatgaagaagtatgcagatgccaatccggacaagattgacctgaatgtaactgagaatgtttatgaagttgcagatatcgaacctgcactgatggatttcgctgatcagggttatgacgttatctttggtcatggcttccagttcatggagccaatcgtcaaagttggcgctcagtatccggatacctatttcctgcttggtacaggttacaaatcactggataacacagctatctatgatgtggaacttgaagcaggcggttatgaaatgggtgtgatcgcagcactggcaacacagacaaataagatcggtgttatcggcggtgcagatgcttccgagatcaaacgtggtcatgaaggcttcaaggctggtgccaaatctatcaatcctgatatcgagatccaggaagtttacacaggtgactggacagatacagccggtgcaaaagaagcagctatcggtatgtatgacgctggcgtggatgttatctggcattcaggtgatggtattggtcttggtgttgttcaggcagctgctgaaaaagatatgtactgcctcggcaacgtagcagaccagaagacattagctgaaaacaatgtattatcaggtgttgtttatcagtgggatgccattattgccaatgtttttgatgatatcaacaatggtacattcaaaggcagagcagaagatgacagatactattggatcaatgctgaaaataatggtttaggtattgcagacattaatgatcctaagggctggctgacagacgatgacaagcaggtgattgcggatacatggtccaaacttcagtctggtgaaatcaaagactatctgccggaagatattcagtaatcagaataggagtcatgtctgcagtgcagacgatcattccgacaatgggagatggatgcacagcccgtgggctgtgtgtcccttctctgaaaaacacagggacgttcaaacacaggaggatttgtaaatggacaatctggcagtcagtatgcagggaataacaaaaatatttaacggtgtcaaagccaatgacaacgtggatttcaatctgaggaaaggttcaatccatggtctgttaggagaaaatggtgccggaaagacaacacttatgaatatcctgtatggtttatatcagcaggaggccggtgatatttatattaacggcagcaaagaagaaatttcatcaccgataaaagcaatctctctcggcatcggtatggtgcatcagcattttatgttggccagaccgatgacagttgtggagaatgttatgctgggcaaaaaatccagaagaggcattcttcttgatacaaaggagacggcgacggaactgaaggaactggcagataaatacaaaatgaatattgatccatattcaaaaatctggcagttatccgttggtgaacagcagagagtagagattttaacagctatttatcagggggcagatatattgatcctggatgaaccgacagcggttctgacacctcaggaggccaatatactttttgatatgctgcgtcatatgaaagcggacggcaaatcaatcattctgattacccataagctggaagagattatttctatcgttgatgaagtcactgttttacgagatggtgagctgataggatcaaaactggttgatgaacatacaaccaaagaagaactgacgaaaatgatggtgggcagggatgttctgtttaatttcgacaagaaccaaaaggcccccggagcagtgaaagtggaactgaagggcctttcagccagcaatgacaaaggccttccggcactgacagattttaatctgactgttcatgagggagaaatccttggtctggccggtgtagacggcaacggacagaaggaattatgtgaagttctgaccggtcttagaaaagcggatggcggacagttcctttttaaaggaaaagaagtgatcaatcaaccgcctgttttctatatcaacagtggtatttcccatattcctgaggacagaatgacaaccggactggcactgaactggagccttaagaaaaatctgatcatcaagaagttccacaaagcgccattttcaaaaaatgggctgctgaatcagaaggctattgatgcctactgggataaatgccagaaagagtatcagattaaggccaattccggagaagaccatgcaagagccttatccggcggtaatcagcagaaagtcattctggccagagaattggatgatcatccggaaatggttattgccaatcagccgacacgaggccttgatatcggtgcatcggaatatgtcagacagaaaattctggatgcacgtaatgatggtgcagcagttcttcttgtatctgcggatcttgaggaaattctgcagctctcggacagaatcgctgtcatctatgacggcaaaataatgggtatccttccggcaggcactgatacaaatacgatcggtatgctgatgatgggacacaaacaggaggaaaaggcatgaattcaaaaatcatcaacagtatcaaacaatttgttattgcggtactgacgattgttctcgcactggcagtgggtgcgattcttgtacggatttcaggcaatgacccggcagaagcatatacaatactgtttcggggagcccttggctcaaaagccaggatatccgaagtccttgtcaaaatgattccgctgacattgatggcacttggtatgtccatcgcttacaaggcacagctctggaatatcggtgccaatggtcagctgaccattggtgcgattctggctattcttccaggtatttatctgggacttccgacagtgattttacttccactgtccctgattttgtctgttctcggcggtgctctctggtgcggtctggcggcctggttaaaaaaccgttttaatgccaatgaagttattacaacgctgatgctgaattatattgcgacctattttctggcatttcttgtttatggtccgatgatggaccctgacggcggcggcttcccgcagtcaaaagtattgccagatgcctatcatctgcctttgttctctgcacagatgcgaatccacggcggtattgtggtggcagtcattgttattcttatgatgtttttcttctggagaacaaagctgggcgtgaagattgatctgatcggacagggtgataagatcgcaacctatgcaggtgtgaatgtgaagaagacagtcatggtggccatgctgatttccggtgcactctgcggtctggctggatggaatgaagtgtatggtgttcagtacagacttttggaaggcctttccagcggctacggggatatcgcaacgatcatcgcattgcttggtggcctgaatccattgggtattgtgatcgcttccttctttttttcagcccttcttgtgggcggtgcaaccatgcagcgtatgacagaagtaccatattctgttgtagatattattcagggcctggtgatcgtttttgttatcgcaagaacagcgattcatttcggattgccgcagaaattactgaggaaggggaaaaaagatgcttagcagtatttttacagtaggatttttagtgagtttactggcgggaaccatccgtctggcaacaccgattcttcttccggcgctgggacagatttatacacagcgggcaggtattctgaatctgggtgtagaaggaacaatgacgatcggagccgtcgcaggcttttcagcagcatataaaaccggcaatctctggattggacttttgtcaggtatgtttttcggtatgctgtggagtctgatcatggcatggctttcagtcaccatgcgtgccaatcaggtcatcgcgggtattgccctgaatattcttggtgcgggtacagcggtttatgtatatcgtatcatttttggtgtacagagtctgccgcctcaggtaacaccgtttgcagccgtgaatattccggtattatcatcccttccggtgatcggacagattttcttccagcataatattctggtttatctcagctatgtgatggtatttgtgacatggtttatccttgaaaaaacaacattcgggttaaaaatccgtgccgtgggcgagcatccacgcgcagcagattccaagggtatcagtgtggccggtgtccgttatgcagcggtactcatcggcggtctttatgccggtgcagcaggtgcatttatgtctattgcttatatgaatcttttcacagaatccattgtcagtggacgtggctttatcgccgtctctgttgttatttttgctcgtttcatgccggtgagagccatgtggggtgcgctgcttttcggttttgccagtgcccttcagatgcgtcttcaggccctgggcattgatatggccaatcagctgatgctgatgctgccgtatatcatgaccattgcagcgctgatctttgcttccaagaaggcggaattcccgagtgcttatacgattccttattcccgattggagcgataggaatgaagaagacaaccaaaatcatcatcgtactgctgattgtcatcattgcgggtataacggttgtgaccagtatgaaacatgcagctgatggaccttctgaggtctccgctgagaaagcagctatggcctatgcggaggctattgattatcagtatgagaatcctgcggttatttatgaatttatgacagatgacttccgaaaggttatggataaaagtgagtttatccgggcttttaagaaagaacggtcctatccgtatctgacgccgctttttattaattatgacagagtagaactcaatgaagacgggacaaccggcactgcttattattcccaggcagccagactgccgggaatggtctatgaagttggacttgtttatgaggattccaactggcatatcaaggattttgatgactttttggacggcagttatctggacaaatttgatacagtcacctatgatctgaagagttattttgatacggagtatccggaagatgaagaaacggaatccgggacggaataattgtcgaccagatgtctggtggaaaaagtgcgctttgaaagaatgcataaaatatgagtcatgaaaggatgacgaaaaaataaaaaggatagtgggggatagagatgtcacagatgctgattccaaatacagtaacagaggcctgtcagatgctgtcatccggcaatcgcgtggcctgtgcaggtgccaccaatctctatgtggacagagaaaagggcaaatatctggacagagatattgtcagtctgcatcgattaaaagaactgtcaggcatcagagaagagaaggacggctggcatataggcagtctgacaacatttgaccttatagaagatgttttcagaggacaaggttccatggatgcactggctgaggccgcatcccttgtgggcggccctcagatccgcaacagaggaaccattggcggcaatattttgtcagcttctccggcggcggataccgtgccggttctgatggcgctggatgcagtgttggttcttgtgtcagaaactggtcagcgtatggtatccatcaacggatttatgaagggaccgggacgaacggctatccatcagggggaaattttgactgaaattgtcattccattcaaaacgggtgccgcaagattcaggaaggtcggcaaaaggaatgcactggccatttcaatcatcaatgtagccgtttatatggaaaaggaagcgggcaggataacggccctgaccatcgccatcggttcagcaggcccgacagcccttcgtgcatttcatacagaagaattgctgcgtgcctggaaaagaccggacagtgaagaaaaatggcagtctcttcatgaagaaattgccattgccctgtcggaggacatttcaccgattgatgatattcgagcaacaggaagttatagaaaaactgtggcagacaatgtggtactgcagcttgtaagagaattatgggaggcatgtgaaaaatgaaaacactagattttattttaaacggagaagcctgtcatacagaaattcctgaagatgccacattattaaaggtgctgagagatattcttcatttgacgggaacaaaagagggctgcggcgaaggtgactgcggtgcctgcacggtcctggtagatggaagaagtgtcaacagctgtctgtttcctgctgttcaggcggagggatgtcaggtcatgaccattgaaggtgttgaggcccatccggagctggccaggatacagaaggcctttgtggattatggtgcggttcaatgtggtttctgttctccgggcatgattatgtctacagtggcactgcttcagaaaaatccgaagcccacggaagaagaaatccgacgcggcttatccggcaatatctgcagatgtacaggctatcaggccatggtggatgccattcagtcactggcataataggtgttgacagaagtacttattaactgtaaaataaatatatcaatggattatatatgttcataatcaggttgagcgtttctaccggctgccgtaaacagccgactataattcccgaaggcgggagagtcggcttgtatggcggcctttctttttatttatcagaaggatagtaagcagtcatatcagcctgaactctgtatatgcctgaataaaccttaccaacgattccgatcagaagtatcggagcagatttgaatgaaaatgggtgatgagtatgaacaattttattatgaagggtgatatctgttacagtgagacttctgatacattgaggctctgtaaagatgcgtatctgatctgtgagaacggcagatcaatgggcgtatttacacagattccggagaaatatcagcattttgaagtgctggattacacagggcatatgattgttccgggattgtccgatctgcatgtgcatgcaccgcagtatgcttacagaggtcttggaatggacatggaactgctggaatggttggaaacctatgcatttccggaagaatccggctataaagaaccggcctacgcggataaggcatacagtatgtttgtgcaggatctgaagtatagtccgacgacacgtttttgtgcatttgcgacgatccatacatcggctacattgaaattgatggccctcctggagaactccggtttaaagggctatgtgggcaaggtcaatatggacaggaacagcccggattattattgtgaggaaagcgcagaagcctcattggaagcaaccagagaatggcttatgcagtcggagcaatttcataatgtccgtccgatcattaccccgcgttttacaccgagctgtactgatgcactgatgatgggacttggggcaatcgcttctgagaaccatctggcggtccagtcccatttatctgagaatctcggtgaaattgactgggtgaaggaactgtgccctgattcagagaactatatggatacctacataagtgccggcttgacagcacccggaagaaaatccatcatggcacattgtgtgtattctgatgaacgggagatacagatgatgaaggacaatgacacctacgcgatccattgtccgcagtgcaatatgaacattgcatccggcattgcccctgtgagaaagtggctggatataggcgtgcatatgggacttggatcagacgtggccggaggtgccaccctttccatcttcagaaccatgatggaggccagacaggtatccaagctcgtctggagattgctggatcagaatctgaagccgctgactctggaagaaatcttctggatgggaacaaaagccggtggcagtttcttcggcaaagtcggcagcttcgaaccgggatacgaacttgacgcccttgtcctcgatgagagccgcatgccgcacccgcaggccctcaccctcagacagcggttagagcgatatatctgtttgtcagagaacggagatctactacataaatatgtctccggaaataagattttttaaacaaaaacagttaaacaaacttttgtaatgccttatgtaccgctgccaatgttgggcaacgcgagtgtgcctgcgtatggatctgctaacgggctgggctttcaaaaactggaaaaattttgcacgtcgcatcaaaagtggaaggaggagcgttatggggattggaaaaagcattcagcgtgtggatgcccgtgccaaggtaacgggccaggcgaaatatacacaggatctgatgacacagccgatgatggtggcgaaggtggtacacagtaccattgccaatggtgttgtgactggatttgatttggatgaggcattaaaagtaccgggggttataaagattgttacctgttttgatgtgccggagattgatttctgtacgccggggcatccgtggtctgtggaggcggcacatcaggatgttcaggacaggcgtcttttgaatcagcgggtccgttattatggggatgacgtggcagctgtcattgcagaagatgagattgcagctgttaaggcagcacgacttgtgaaagtacattatgaagaataccaggcactggtggatgtggcagatgccatggcggagggggccgtggctatgcatgacaatgtgccggataatattttgaaacatacatctttcgccctgggtgatgaaagctttgatgaagctgtgaaagaaaagggacttattctggtggatcagacgtatgatacccagcgtgtacagcactgccatattgaactgccggtttcctttgcgtatcaggacggcaacggcaagattaccgtaaccacatctacacagattccgcatattgtccgccgtgtcatcggtcaggcccttggtattccatggggacaggtcagagtgatcaagccctatatcggcggcggcttcggcaataaacaggatgtactttatgaaccgctgaatgctttcttaagtctgcaggtgggcggtcgtccggtgaaactggaactgaccagagaagaaacatttgcagatacaagagtgcgtcatgcgatccgttttcatatgcagggagctgtaagaccggacggtacactggtggccagaagagtagaagctttttctaatcagggcggttatgcttcccatggccatgcgattgtcgccaatgcctccaatatgatcaagcagctttatcgggatgaaaaggcccttgaatcggagagctacacggtttacaccagtacagtggccggcggcgccatgcgtggttacggtattccacagggagattttgcagcagagtgtctgatggatgatctggcgacagccattcatatggatccattagcctttcgtttgaaaaactgcatggaagagggatataaggatccacataacggtattacattttacagctatggcctgaagaaatgtattgaagcgggcaaagaggctgtgcattgggatgaaaagcgagccgcttatgcctgccagacaggcagcagacgacgtggtatcggtatggcgattttctgctacaaaaccggcgtttatccgatttctcttgaaactgccacatgccgtatggtattgaatcaggacggttccattcagttgatgatgggagccacagagatcggacagggagcggataccgtctttacacagatggcggcagaggtacttggcgtgacagaggacaaagtgtatattgtttccacccaggacacagatgtcacaccttttgataccggggcttatgcttccagacagtcttatgtcagcggcaaggctgtgaagaaaacagcaaagatgatgaaggaaaagattcttgaatatgcagcctggaaattgaagatggatcagcagacactggatatccgcaataatatgattgtgacagcagagggcgaagaactgctgacaatggaggcactggcgacagaggcattgtacagtctggaacgttctgtccatatcactgctgaggccaccagccactgcaaagagaatacatttgccagcggtgcctgttttgcggaagtggaagtggatatgccgttaggaaaagtcaatgtactgaagattatcaatgtccatgacagcggtattctgatgaatccaaaactggctgaggcccaggtgcatggcggtatgagcatgggccttggttacggactcagtgaagaattaatgtatgatgcgaagggcaaaccgctgaacaacaatcttctggattacaagctgccgacggcaatggatacaccggagctgaatgttgagtttatagaattgcaggatccgacaggacctttcggcaacaaagccctgggagaaccaccggctattccggtggcaccggctatccgaaacgcagttttgcaggcaacaggcattggctttaatcagcttccgatggagcctcagagactggtggcagcattcaaagaaaaaggactgatataggcggggggatgacattatgtatgatattggatcattttatgaggcagccagtgtagaggatgcaatcaggaaattgcaggaatggttggatgcagagattatttccggcggcagtgatgttttgatcaagatcagagaaggcaaattagcaggccgatcccttgtcagcattcacaatattgcggtattaaaaggggtgataatggaagaagacggaaccatcgtgatcggtccgggaacgagtttttctcatatcacggcgcatccgctggtgcagcagcatattccgatgcttggatatgccgttgatcaggtgggcggcccgcagatccgcaatatcggaaccattggaggcaatgtctgcaacggtgtgaccagtgcggacagtgcgtcatctctgtttgcctataatgcgattctggagttgacgggcccggagggcatcagacaggtgccgattcaggaattttatacaggtccgggtaaaactgtacgccgccatgaggaagtgatgacggccatccgtatcagacgcagggattatgaagggtacaccggatgctacatcaaatacggcaagcgaaatgccatggagatcgcgaccctggggtgcgcctgtctggtgaagctgtcatgggataagaaagttgtcgaagacatgcggatcgcttacggcgtggcggcaccgacgcctgtcagatgtccggagacagaaaaatcagtttcagggcaggctgtttcaaatgcattgcttcttcagaccggcaaaggtgttttgaatgaagtgaatccgagaacttcatggcgtgcctcgaaggaatttcgtctgcagctggtggaggaactggcaaaacgtgctatggcgcaggccataagaaatgggggaggtgaagtcgatgcttaagattatccatatgaatgtgaatggcaaagcagtggagctggccattgatgacagagaatctttgcttgatactttgcgtaatcatctgggattgaccagtgtgaagaaaggctgtgaagtgggagagtgcggtgcatgtactgtactggtggatggagaagccatcgactcatgcatctatctgactatgtgggctgagggcaaacacattcttacagtggagggactgcagtcaccgacaggagaactctcggagatccagcaggctttcgtggatgaggcagcggtccagtgtggtttttgtacaccgggcattattatgtctgcggtggagataatcggaacaggacgcaaatatacccgggacgaactccgaaagctcatctccgggcatctttgccgctgtaccggctatgagaatatattgaacgctctggaaaaagtggtgggctattaataattatctatccgagaatctcattgaaagcctgggtggcctctgtcatctgttcctgtgtcagggaggagtagttgactaccagtatatgctgcatggctttctccgggtgatagtaatatttggataacggcataatgcggatgcctttggctgctgcccgctgacagatgatctcatccgtgagttcggtgtctatcttcatcagaaaatgcagaccggcgtcctcacctttgatggtgacatgattgaaaagaggactgcttttgatgcactgtagcagcatatcccgcttgtcgtgatagtgaatacgcagacggttgatgtgtttttcaaagtgtcctttgttgataaaggcagccagtgtatattgttcaaaattggataccgtgcaggaataaaactgcatcttggcataataggccttcaccagatgtttcggcagtaccatatagctgatacggacggtggaggccagtgtttttgtaaaagtattgatataaatcactttctcaagaacatcgatgctctgaagggttgggattggctggccagtcagacgaaactcgctgtcataatcatcctcgataatatagcgggaaggtgcttttgaagcccatccaaggagttcgtatcgtcttccgataggcatggtgatacccgttggaaactgatgggaaggggaaatatgaatgacatcgatatttttctcctccagttctgaaatctggatgccgctgtcatccatggcaatataatcacagtccacattgtggctgttgtatattttggcgattttgtgataacctggatcctcaatggcgtatttcttgtcaaagcccagcagctgaatgaggataccgtataaatattccgttccggccccgatgataatttgttccggggagacgtgcagaccgtgaaaatccttcaaatgtctggcaatggcttctcgaagctccagtataccgccgcagggaggattgatcatcagcttctgctgactgtcactgagcagttcccggatgagccttgaccagatagaaaagggaaaatattctgaatctgtctggttgcttgtaaagtctacagcaaaatgaaggctttcttccatatcagctttttgaatcatggatgggctgtcgatggatgaggaagaaccgttgtcttcctcaaagggatgcatctgttccacaggaaggatcgtatggatatcggaaacaaaatagcccttttttgggatagaataaatatagccttcggcgattaactgggcataggcattctcaacagtgatggtgcttatgcccagatttttggcaaaatttcgtttggacggcagtttctctcccatagagagattcccgcataatatatcatttcgtatgcatttatataaatgttcatataaagaatctgaccctgttccggcaaaagagtaggtaagcatctggcatgtaacctccaatctggccatcttaaataatatcaaaatggctatttatttatgttcagatttcattataatggaaaaaaacttagatgtaaacaaaggagaacgaaaatcatggcagaaaacagatatgaattaaataaacagctggcgcagatgttaaaaggcggtgtgatcatggatgtaacaacaccggaacaggcaaagatcgcagaggcagcaggtgcctgcgctgttatggctttggagaaaattccggcagatatccgtgcagcaggcggtgtagccagaatgagtgatccgaagatgatcaaagagatccagcaggcggtttctattcctgtaatggccaaatgcagaatcggacattttgtggaggctcagattctggaagccattgaaattgactatatcgatgagagcgaagttctgtctcctgccgatgatgtctatcatattgacaagacgaaatttaaagtgccgtttgtgtgtggtgccagagatcttggtgaagctctcagaagaatcaatgaaggcgcttctatgatccgtacaaagggtgaaccgggaaccggtgatgtggttcaggctgtccgtcatatgcgcatgatgaacagtgaaattgccaagatcaagggcatgagagaagatgagctttttgaggctgccaaggaattaagagtgccttaccagcttgtacagtatgtgcatgaaaatggcaagctgccggttgtcaattttgcggcaggcggtgtggcaacaccggcggatgcagcactgatgatgcagctgggtgctgagggtgtctttgtcggatcaggtatttttaaatccggcaaccctgagaaacgtgccaatgccattgtcaaggcagtgaccaattacacagatgccgctatgatcgcagaattatccgagaaccttggtgaagccatggtgggtatcaacgaagatgaaattgcccttttaatggcagaaagaggtaaataaacctgtgagaataggctgataagcctgagagaattaggataaatcgagaaaatcaaaatgtacaatgtacatgaggaagaaggagtgtcaatgacaatcgcagtactggcagtacagggagcatttgcagagcatgagaagaaactggatgaactgggtatctcatggtttgaagtgagaaaaaaagaagatttagacatatattacgacggactgatcctgccgggcggcgagagtacggtgcagggtaaattattaaaagagctgggaatgtttgacagactgaaagcgcagattgaaaagggcctgccggtgtttgcaacctgtgccggactgattcttctggctgcggagcttggcaatgatgacagaagatggtttcagacccttccggtaacggtgaagagaaatgcctatggccgtcagctgggcagttttcacacagatgcagaatttgaagcaattggtgtgataccgatgacctttatccgggcaccgtatatcgaaacggcatcaccggaagtcaaagtcatggcaaaggtggatgaacggattgtgggcgtgagatacaaacagcagctggctatctcttttcatccggaactggataacgataaccggctgcatcagtactttgttcagatggtatcttcatctctcaataaagagaaatagcggtccagatagatcttgtgggcaacagtgatgatcatattgcagagcatggttttctcattagagaaagtgccatgctctttttttgtgttatggtcggtatcttttctggcatcggccatatctaattgaaacacatgccaaaggacctgctcaaattcctgacaaaaataattataggcggtttcattatcataggtctgacgctgaatctcaaacatcatatggatattgtccagagaaagtacagatttggcaacagcaataaagatcagggcagcaatctgatcccggttgtattgctttttgacgggattgttgatgatcttctttttgacatagttactgatcatagagccggtgatgctgatatcttccagagggcttaagtaactgtcgatatatttggcggtctgttcaaggtaaaggccgacatcggggatttcctgatagcgggggaggtgaaaattgtgaatagggtcagccattttggataggatatgttcgttcataaaacacgctcttttctttattttgtatcgtgatcgtttgttatttgggtgattatttaattatgaaacaatcatgttcatggttgtacttgtttagtagaagcatagcattctttattccgggtgtcaattataaagattggaaaaatgctgatatcggtttttgaaaaactcttgacaaagtaatgaaagtgatatagtataatagcacaaggttttgaaaaacttataatgttgtaataaagacttttaaaatataaggaggatgttttatgcggacacagacattgacgaaacagatgtatacagcgagtttggatagagacagagactttcatttcagagtaaaggacccgggaagtgcggcaacccattttattggatttctggcagctgttttgatgacgccggtgttgttagtacatgcagcaggcaatggtgcggattttatgacgatgatcggtatgagtgtttttatgatcagcatgattcttctttatggtgcaagtacatcctatcattcattcgacatttcagaaaaggcgaatctgcgtttgaagagactggatcatatgatgatttttgtattgattgcaggttcctatacaccggtttgtttgactgtattaagggggagcattggtatgagattgctggctatcgtctgggggctggcgattgtggggatgatttttaagctgctgtgggtgacttgtccgaagtgggtatcatccgtgatctatatcggcatgggttgggtgtgtattctggctatgccgcagcttcttgcgggattatcatttggagcgttcatgtggcttctggccggcggattgttttatacagtgggcggcgtgatctatgcgatgaagtttcctgtattccataaccgcttccgatactttggatgtcatgaattgtttcatgtctttgttatggcaggcagtttgtgccacttcgttgttatgtatgcttatttatgcagctaaagacggttgatgaaaatgatagaagaagttgtgatttaacaaaagttagcaagaattctccttcctctacaggtgggagatgaattgcagaaaaaagaaaatagaacgcttgttggagccgatgactggggtgaagtcgtaacaaggtagccgtatcggaaggtgcggctggatcacctcctttctaaggaaaagaagtagggattgttttgttgttgtgttatcaaagagataacagaaactgctggtggcgatgcgcttaagggacacacccgttcccatcccgaacacgacggttaagacttaagcggccgatggtactttgctggagacggcacgggagagcaggtggctgccagtccaaaagaaaagaaggacctgagagagggttttaaatatagatagaaggacatggctgagaggcagcacgtcagggacagagataacaatgtaaagtcctggcggatgggtccgaatcccatggatgttcatcgcacgaagataaaaggaacttagttattagattaattaagtaacggatatccgagtgcagataactatgtaccttgaaaactgcatatcagaaacacatcaagccgtaaatcatcgaaaagaaaagatttacagatttctaaagaaatcgaagaaatagaaccgaccacatcatgacgctacatgatgtggggacgaaaggtcaagcaagatagggcacagggcggatgccttggcactgagagccgacgaaagacgtgataagctgcgaaaattagggctttatttgacctcagaacagaattttgattattagacgtattttcagttgggttttagtttttcattcaaggttcaagaaaacgaagcctatttttcgatgaggaggaaagtatatgtttggaccttttgataagtattttgattttgatcatgatggagagttaagtggatttgaaaaggcagcagagattggttatctgaatcgggaaggatttttctcagatccgaccagagatatcagcagagaagttgatatggatgatgattatgatcaggatggctatgatggcgatgattatgatcgggatgactatgatgatgattacgattcagacgacttcgacaatgatgatttttaactgacgcggattgtgaatcggacactcggagagcagaaatgcgcttcgagtgtttttttgcattttacacacaggatagaaaaactgagtgagaaaaagaagctggtatttttatagcccacctattgacgtatactctaatcaatgaaagacggaaacaaagatattcatagaaatggaggaactggcaatgaagggatttaatacaagcgatggatacatgggattagttggaggcaaatatatcttgtttgccagtgaagacgattactatgaatacatgaatgattaggaaatcattttagagaaaatcatgtctgtttttgtcacagaatttgaggaataccgatggttaagtctgcggagtgcaggtgtatttttagttagaagtttattatacttaggttaaaatgaagcgtgttttagagagaagaaaggtggaacggataatgaaaaatgatactagaaagacggttagaggtttgctgattgccggtgttgttgtaatggcagttagtattatgtggccttcattggcagagaaatatggtacttcgaaacagacggcatccaatgtattacagagtgagacttcatcatcctattcatcatcgtctgcgtcgacatcaacatcagcatcaaaatcgacgtcagcatcgacatcaacagcatcagcgacgtattcgcattcagccggcggaggcggcggttctacaggttcttttgttaacggcgcttcaggcacgagttcaggttcttattcaagctccggttcttcatcgggaagctcaagttataagaagaattcaggttacacgagcagttatgaccgtcagaagaagtatgacccgtatgatgcttatgattatgatgatgcagatgattttgcagatgactgggcggaagaattcggtgacggtgattatgatgatggatacgatgatgcctatgactactgggaggacgagatggatgattaaacatttggagtatgtcggtcagatgatataagaaatgggggagaaaaatgttttcaacagcgattattgcttttgtaatctggatgttaattagataaaaggggagagaaagaatgttttacttagtgattgatttagaaatgtgcagagtaccaagagattatcggaacaaagcttatcattatgcctatgagacgattcagattggcgcagttcttttgaatgaagaattcaagcaggttgggacaattcgagaatatgttcatccggaacacggggtgattgatccatttatcgaaaaactgacgggaataaaaaacagtcaggtcaagaaagcaccgtgtattggggaggcattagtacatatgatcgactggattggggacagagaatacaaagtctatgcctggagcgaatccgatagaaatcagcttttgcatgaaatcacagcaaagcagattacggatgagagcgtcgatgcttttatgatggaggatagatgggtggattatcaaatggttttcagtcagagatttcagctgactcggtgtattagtctggaagaagcattggggcgagcagacattgatccgaaaggtaagtttcatgatggaatggatgatgcagtgaatacaggtcttttggtcgagaagctggaaatgaatccggactatcagctgattagttacgaaatgccggagaaaccgtcggaacatcttggcagcacacttggggagttgtttgcagggctgaatttaaagctagcgtagagaaacggaggatgagtttatgttaatgctaacagcagtagtatcatttttggtgttgtcatttgcagcagcttgtagaggagatttttcaggatttggtatgattgcagaaggtatcctttatattgcagggattttattaatgtgctggttgtttacgcagcctgtcttattaggaattcttattgttattggcattgtcattgcttatgcgagttacagaaataaaaaggaaatagaataaccgtgggaaggagaagattaaaatgacaaagatttatttcacattaacagggacgaggcattattacggatcagattttttaaaaagcggcatgaagattcagttggaaaaagagccggataataaatatgatcctgaagctattcaagtgaaacttaaaggtatggggaagataggttatgttgccaatagtccgtatacaatgattggagaaagcatgagtgccggaagaatctacgacaagattgacaatcaggccaatgcgaaagttgtgatggtaactccgaatggaacattatgtaagctgagcaagaaaagcctggtgagttatacagtgaatgagaaggcagagaaaaaagaagaagaggagttatcctttgtataagcagtgggccattacaaatgattgaaaagtcgtttgtaatggtcattttgtaagaataaaggccctatttgcctaattcttatggtatactaatgctatagtgtatattgagtttaacaaaagttagcaagaattctccttcctctacagttgggagatgaattgcagaaaaaaagaaaacagaacgcttgttctgtggcgcgaagtgtggtatactataatcagtcgaaaggatagaaaggactgattatatggacaaaatggatcataatgcacagagttgatggcctcgtggtcaagcggttaagacaccgccctttcacggcggtaacacgggttcgaatcccgtcgaggtcagtcgatgaattattcttgacgaaaagaagatggcatgatatactaatctagtcatgtgaatttaatatttatggcgcagtagccaagtggtaaggcaatggtctgcaacaccagtatccaccggttcaaatccggtctgcgcctctttaataagcctgaagagttttcttcaggcttttttattgttcgagaatccgccattttgaattgtcaatagggagacgatagccgcaataggagcagcatccgtcttggtcagggataaaattggccccacagcgcggacattctttttctgcataaacagcctgacctttggacttcatgcgttgcggataacgggctctgtataatttcaaatcaatgggctgattgctggcggatatctgatgattcgggctcaatatcagctgatgtaaaatggcatgcagtgtgatctgtgtgcgcgtatctgtattttctacagcctgcagttgcagctggtctacactgtaatacaaaagctccgatgaaacggttttttcatagagggcttcattcagatcggaatgcagtactttctcatcataacgaacaatttgtttctttaaatcttcaatgttatctgtttttcggaggatccgcagccaaagtaaaagggcgagcagggcagtgataacaaatgcgctgccgagggccagaaaatagctgtgaggtagaataaaccgaaaacacgggatcgcaggaatgaagaaagcaatcatggttgctgcggttaatttaaaatttctcgtattcgggttataatcccggtagattaaaaattcttccgtctgccagtcaaagaaatcactcttaatatagccgccgcaataaggacagtgatcttcgtcgcttgtcagtgtgacagtggccccacagcttggacagatgacgttcgtatactgtgaataaaaaatctgctcatcatttctgtttttgctgccgacctcattgtggcggatatgccgggattgtcggagcaagactgcaccatgagcaaaaaaatcttcgtaaaggattcgattgttttttctgtccagatatctgttcaggatagtgccctgcaggacgacttcacgccattcccggccggcatcgctccagtgtttgaagtcgttctttttgatatactcttccggaagtttgagataagccatacgcatctcacggcgaatgttgtttttcttcagcagatggatctcgtgctcaaattttcggcgaaaggactgatccattcgcaaatccggtgactgaagattcccggtctcaaatacgttaatcaagtcttcgaatggtttgtgaattttatttggaagctctgaacatttaaagaagatttcttttgaatgggcaaggttccttttgacgtaaaggaaccatagttttggctgcatccattcgaatttccaatccaggacatgggagaccagcaacgatccccatatgcatgaccatgcgaatgcaaagacaattgcgtctgtccatgttacagtcattggttcacctctgttttcttttttgatagatggacaagtcagatgtctatgtcagctgatgcggacaagacctgtccatcaaggcttacgtgtgcctgaagtgaataataaaacaacaccggctaacagcgggatgaatgaaaaaataatggaaaaaacagatgttcccaaacctggcaccccaccttgtgcaatggcagtttcacggtcaagttcgttttccatcagattatttgtgatgccggcgactgcattgagcgtatcgccattctgaataccgatggcagtaacggtctggcctgttttaaaattcgcaccatcataaaaatagcgataatcattttctttatagtttctctgtgtctgactcagcggttctatgaaatccttttgtgaataattggcatcagtgacccagacataaccgctggcttctaattcagaacggtcataatcatgccatgtgccattgagtacgatggcatcgataaaatcctgtgaaagcgtataattgccgattttgccctctccggttaatgtcttgtcgcgataagcagtactccattcaagaacaccgttgcgtttttcttcctcagtcagcgtttctgcattcgcttttgtcgctttcgttgctttgttcagtttcattgtctgtttggaacgtgaagtgcggatgctgtcgatggttaatccaagttcatcatcataggatggggttgtcagctcaaacggcccacatacgatgacgattttgccgtcattggcatcattgatcgcaccctggccaacataaacggcatctttcagtgcacttttcattttcggtgtatccacaaagatcatctttaatgaggagacggcaaaaaacaatccgatgacaagaagaagaacacctgctattttttttaacattttatcaaccttcctttcgtttgacagcttgatcagcgccggttggcgcaatgattccgattgtattatgacatggttcatttttttggtcactagcacttaagatagtgacattggtttccttcttttatattctggtagtaagatagggggatttgtatgaagaaaaatgtgcaatggctcgttatttttgttttcgcactcttgttgctgaccggatgtaaaggcagtgagcaggaaacgcagaaaaaaaatggggagtcggaagatgtatcatcaaaagtggaggcatttttgaaaaaagagacgaatcagagcagtgaggcaacacagcttttgacagagacggatgcatcggaaacggcggacatgcagtcaacggaatcgatgacagagacagaagtgaccgcatgggatgagcttcagggcaagatgcatgagaatgattgcaatattgcgatggctttccttgggtatatcagttatgaggcggatgaggtgaagattcgtcaatatgccagccaggaagcatgtgtacagtatgattttcctgagaaggcagatctggtggactgcggaggcgaagaagtttatgccatcgtgccgcgcgccggaatgtctgtctctgtctatcgcgtggaaatgtcagagatgggagagtacgatgacaagttggagacatcgctttatgaagggaaaaaaggggaaccgattcttcttcgatgcaatgtcagtgagatttttccagatgtgctgctgattgtctctgatggccgaacgatgcatctgttccgtccgatgatttccctgagggacggtcatctggcagcagaagaaggctgttatgatttttcagtgtatgaaccgctcccggatgacgggggtgagataggaccgtttgacggacaaaactgggatatcgcctatgaaatactgaacgaagtgccggaagtacgagaagccatcgctaatggcatgcagatcatggacacatgtgaaatggaagaaatagatggtcgtccgtgtcgcgtatttgtattggggacgaatcatgacggtcagtttgtccgggagcagtactatgccgtgtcagataaccttgtgtatgtgtatgatgccatcgatgattgctggctgattccagataggaactagtacattgttttcgaaataactacaccattcacttgcctgcgaatcctattgtacaggtagaaaagcctcagcgtagcccgctacgcctgcgtttttttacctgcacactcgaatccgcatcctacgcgattggtatagttatttacgaaacgatgtactagtacatcgttttaagcatctgatgtccggctgtccgaaaggagcatcagattgcgaacagacgtgattactatcaaaagtgttagtgaaaaaacagcgatattttcttatactgaaagtagaaagaaatgaaattgcatcaacagcacgaaaaatcgggaatgatgaaaggagataaagcatatgggattaattaaagcatttgtgggagcagcagaaggaacattggcggatcagtggaaggagtttttctattgtgacgcaatggataagagtgtgatggtaaagaaaggccagaagagaacgggtgtccgctcatcgaatgtccatggcaatgacaatattatctctaatggaagcggtatcgctgttgcggatggtcagtgtatgattatcgttgagcagggaaaggttgtcgaggtctgtgcagagcctggacaatttacttatgatacatcgacagagccgagtattttttcaggaaatcttggagacagcatcaaggcgtcatttgcgacagtcggcaaacgttttacatttggcggcgatacaggcaaggatcagcgaatctattatttcaatacaaaggagctgattgacaacaagttcggcacaccgaatcctattcctttccgcgttgtagattccaagatcggcctggatattgatgtgtctgtccgctgctcgggtgtttattcttatcggatcagcaatccgctgctgttctatacgaatgtgtgtggaaatgtggagaacgaatacacgagagacgagctggacagacagctgaagacagaatttatcagtgcacttcaaccggcctttggcaagctttctgaattggaactgcgtccgaaccagattgtgacacacaatacagacctggaggatgcgatgaatgaaacgctgtctgccaaatggggtgaactgcgtggactgaaggtcgtcagcattgctctcggttcggtgacacttccggatgaggatgcagagatgatcaaacaggctcagcgtacagcgatgctgcagaatccgacgatggcagctgcgacgatggttggcgcacaggctgatgcaatgaaagcggctgcagccaatgagagtggtgccatgaatggttttatcggtatgggtatggccatgaatgcaggcggtggcatgaatgcgcagaatctgtttgcaatgggggcccagcaggaggaagcaagacggcaggaagaaatgcgacgtcaggaagaagcaagacagcaggaggaagcaagacggcaggaagaagcaagacgtcaggaggctatgaggcagcagatggctgctgcaccggttcagcagcagaatgcagacagttggacatgcagctgcggttatgttgcgaccggcaaattctgtccggaatgtggtacgaagagaccggagaagccgacaggctgggtttgcagctgtggtgcactcaataaaggaaagttctgttctgaatgcggtgcaaagaagccgacagaagaaccattgtaccgctgtgataaatgtggctgggagccggaagatccaaagcatccgccgaaattctgtccagaatgcggcgatccgttcaatgatgcggatattcagtcataatagataggagtgattgtatgcagaatatgcaggaatataaatgcccatgctgcggcggcgcaatcgcttttgacagtacgattcagaagatgaagtgcccgtattgtgattcggaatttgagatggaaacattgcaggcgatggatgaacaactgaaggaaggcaaaagcgacagcatggagtgggaaaccaaagctggcggagaatggcaggaaggcgagacagatggactaagtacctatgtttgccagtcctgcggtggagaaatcgtcggagatgcaacgatggcggcaaccaagtgtccgttttgtgacaatccggttgttttcacgggaaaatttgcaggtgcacttaggccggatctggttatcccatttaagttggacaagaaagcagccaaagaaggactgatgaaacatatttccgggaagcgtcttttgccgaaggttttcaaagaccagaatcatattgatgagattaaaggtgtgtatgtgccattctggctttttgataccgatgcggatgcgcaggtcagctacaaggcggcgaacatccggacatggagtgatagtcgttacatttatacagagaccagatatttccttgtaaatcgtggtggcagcattggatttgaacatattccggttgacggatcatccaagatgccggatgatctgatggaatccattgagccatttgatatttcagaagcggtggattttcagacggcgtatctcgccggttatctggccaacaaatacgatgtcactgccgaggagagtatagacagagtcaatgcccgagtgaaacgttcaacagaggaagcgtttgcgaagacggtcaaaggttatgattcagtgaatgtggaaaacagcaatattcagttcaggggcggcaaagcccagtatgcgctttaccctgtctggctgctgaatacgacatggaacggcaatcagtatctgtttgcgatgaatggtcagacggggctttttgtcggagatcttccgattgatcagtctgcggcaacaaaatggctgcttggccttactgtgctgataagtgccatgtcctacggtgtcatctggctgttgcatctatttggattattataagaggagggtaacagaatgaagaaaacattacgcatgctattactcgtccttgtgttatgcgtcggtctggtcatgccggcagcagccgaaacaacagatggttttgccagcgaccatatctgtatggtggatatggccggtgtgctgaatgagcaggaagtcacagaactggaaatgatgatcgatgagatccggacgagacagaagtttgatattgcgattctgattgtttcagaggaagatattccgtcgatggaagaatatgcagatgatatttatgatggagccgatatggggtatggacagacaagagacggtgtgctccttgttgttgatttaaagtccagcgagtgttatatgtccacaaaaggatatggcattacggttttcacggatgccggcattcaatatgttggtcagcagatgcggccggagctggcggacggtgattatgcgggggcctttcgcacatttgccacactgtgtgatgattttatcacccaggcaagaaacggtaagccatatgatgcggacacgcttcctaaggaaccgttgtctctgatctggattcctgttgccattgtcattggttttatcattgcttttgtgattgtcggtggcatgaagaaacagctcaaaacggtgcgtttccaggctaaagcggatgattatgtcaaagccggcagcatgaatattgtggataatcaggaatggttcctttaccagaacattgtcaaaacagagaaaccgaaagataacgataagtcgtcaggcggaagcagtacgcatacatcctcctctggtagtgtccatggaggtggcggcttcaaattctgatgtttaaagggggaaatcaaatgaaaaggtcagcagttgttcttttatgcgcgatattggcactttcatcggcagcctgtggtaaaacaggaccggatgtgccaagacagacagaagctatgtaccgtacatacgagtatgcatacggtaatctgaatatccagctgccggaggatgcagatgatccggaagacaaagggacttctttactttttacggatccggagaatctctggacactggaactgaagccactggatgtgcagaatacaaagatagaaatcagtaatttagatagtcagatcacaccggagcatgcttattttaaagatgttcaggaaaatgaagatccgtatcaggattttgcggcacatttctggagtctgaatttcaatatggacaacccgggcgggatgagtatgtactacaatgaaccgaaggcgtttcaggtgatcgattatggtgatacgctggtcggtcagtggggcggtctgaagctggaactgacggggcttaacaaagaaacacagattcaggatatacttgcagatccacttgtgcgctgtatctgggatcatctgagctttcaggtgacagaaggcggcggtctgacagagaatgtgggaatcagtgcagaattcccggcacgatggaacaatacaataaaagagaccggtatttgtaccaatttccagggagacagacttggttatctgtctgtcacagccgtgaaaccggcagatccagaggaagcggcagcgttatgtcaggatgatatagaggaaatggattttggcggacttcattattatgtgacggtgaaaacatttggggacggtgaggatgccagtgaacatctgcgcctgtatacaaagtttaccgatgactacgctgtgtgtgttgaaatggcttccagaggactggtgggagatgaactgtgggaattactgaatgatgagaatatcagcaatatcttaaacagtatcagacttgatccatccggttttaaggatccggaattaaaatatacgaatgccgacgggtttaaatgtaatgaaattggctacattacggaatacacaggaacagcagaagaagtgatacttccgcagacaatcggtgatgtgacgatcagtgatatggagaatgcgctgtttaaaggtcatacagaaattaaatctgtcattatcccggaaggctatgaagtcatcagcagagaagcgtttaaagattgtacctcacttgaacgtgttgagattgcatcgtctgtgacgtatatcagcacgtatgcgtttgagggctgtacggcactgaaagaagttgttttcaacgaaggtctgacagaaatcgctgcctatgcatttgatggttgtacggcacttggcgacatcacgctgccatccagtacggtggctgtaggcgcttatgcattcaggaatacaaatacatctgtggatggcgctacatttatctgtaaaggcaatgccgtatttgacacatgggcacttgcagaatccggttttaagacagttcagttccttggcaactgtgatctgtcgatagatgctgttttaggttatgccaaagtcgaaaatctgacaatcggtgaaggaacagaggtgcttggttccaactttgcctcaacagattttggagagacaacaccattgacggtatcattgccggagagcttaaaagagattggcgacggcgctttttcacagcgggagggtctgacagaaattgatctgaaaaatgttgaagtgatcggagaagatgctttcgcctataccggattgaaggaacttctgattccgggcacagtcaaagaggtcggtgcagcttttgatagctgcatacagctgaagaccatccggttgtcagaaggcgtggaagcaatcggagatgaagcatttagctttgcaggcagcggcaatggctctgaaggggaatacgtgacgtatctgacagatgaagcgtatgaaaaaaacaaagcttatgtctatcaggaagatgagaaggcaggctttgtaaatgtgtatttgccgtcgacgttaaagcgagtgggtgcgaatgttttctatggcgcgtacgtggatggcatttatatggagtggtgtacaagtccggatgcactcccgtcttttgatccgacctttgtggaggataaggttgcgggcattcatcagatttattttacaaaggaaacaatcgatgcgtacggtgatgaactggatgcgtattttatgaatacgaatgcaaaagattgttgctggtatccgaatggccaaaaagcttactggtcatcacaatctcttgaataagcagagcgtcgatagacaaaaaagaatgtgctgcggcacattcttttttgtctataggatttgcacagttactatagtataatgaaatatatcatgggtatgcacattgctgccggatcaagaaaggaataagcgatgtcctacaagaagaaaagagcgctgtcctatgtggtggttgcatgtcttgttctgattgcgagcttatgtcggcatgagcagtcagagaatatgtacgtgagtcatctatttgaacaatgtcgaagcagtatttatattggcttgtactgtgcatgggtcgtttatctgaataaacatgtcgtggaaaggaaaatgcgcaagtgcctgacctggatcggctgtctgatggttttctggtttctgatacgaacgattaaatatcttattatcgttgattcgtttggaagccgtgtctgttggtatctatattatatcccgatgattctgattccgacgcttgggttgattgcggccttattgatggatgagggggatgaagtgaaaacgaagaagcagacggtctgcctgctaattcctgcaagcatcatgattctggcagtactgacgaatgattttcaccagaaagttttttattttccggaaggctttttattgtcaaatgagatatatcattatgggcttgtgtttttcatcattcaggcatggatgatgttctgcatgattataatggaagtcgttctggtctgtaagagccggattccgggtaagacatggttttggtttccaattgttccgggatttctgctgcttgtctggaatgtctgcacgatgctccgtttgccgctgattaaagtgattgcgggagatatgacggcgacttgctgtttgttgatggcagcgatttatcaggggggtattgcatgcggactgattcagacgaataacagatatattgaattgtttcaggcagcgggtggtttgaatgcagaaatcacggatgcgaattttgaacgccactatcagtccggaacttttccgaatctgacacaggaagtacgacagggccttttgacagcaccgctcgtgatgcgggacggcattcgcatcaatcatcttttcgtacagggtgggcatttgttctggacagaggatatttcgttgttgaccgatcagtatgaggatattaaggagcagcaggaagaattaaaggcgagaaaacgtcttttacaaaagacatatcagcaggaagcaaaaagacgaaaagcggaagagcagaacagacttctgaatttgatacagagtcagacaaccggacagctggaattgatgacgcattttatggaagagctggaagtcactgaatcaaaagacgtctatgagcgtctgcttgcgcagataatcgtgatcggaacttatctgaagcggcgcaaaaacctgcttctgacgatgaacaatgacagtcaggcgggcttgacagaagaagatctgattcagagtctggcagaatcctgttctgctttaaagctttgtcaggttcgggcattgtactatgttaatgtccgtccgcttgttttgcatgacgcagagatcgtgcaatgctatgattatttcgagtggctgacggagcaattattcggtaagatgcagatgatgtttttccgtgttgttgtgatggaagaacatttggtaatttctgtacatgtcgattccgagtatgatcttcagaccttgttgtcaggacgctcagggacagaagtgcagaaggaagatgagaaagagtggctgattcgatggcgaattttgtagagagcagtgtggggatacagaattgtgtgatgatcatgatggaaatctgtatggcttttgaaatgatgctcatccttttgtgtgtgacgcgttttgaggggctgaaaaggattatattaaccgtgatacttttcgccagttcattttttatgatggcggcatttcagaatgaccatagctacagtataggaaagcggatgaatcgacatgtcatgctgccggatataccgatggtactgattgtgtgtgcggtcacaggactgatgctttatctgatctggaattttcttggagaacgcagacgggagaaaacgctgttttctcaatggtctgtgaatgatgcggttgataatgcaccatgcggtgtatgctttgcggatacattcggccggattgtgctctgcaattcaatgatgtgggaaatgagccggatgctgatgggggagaaactgcaggattacgatgtcttgcatcaggcgttacagcatacgggccgcatcgcagagggtgttgtatccatgagcagtacggacagtgtgttttgttttccaaatgggaaaatatggatgtttcaggaatatctgctaaaggatcaggaattggcgggttataaacaggcgattgccattgatgtttcagagctttattacaataatgaaaaaatcaaagccaacaatgaaagactgcagagtctcaacagaaaactggaagagatgtatgagaaaatcggtgagaggatacgggagcaggagatattggcgatgaaaatgcaggtgcatgataattttgggcgaagtcttctgacaatccggaaaatactggagaataaagaaaacatgagccatatgaataaacagctggatgtattaaaggagcaggtgtatattctcaccaatatgacagttgaaaatctggaagatctgtatcagaatacaggtaagcatgcgagggagctcggcatagagattcatctggaaggagaagctccgaagaattcgacttacagactgttattggatcgtgttatccgtgaatgtgtgacaaattgtgccagacatgcgcatggaagtgacgtgaatgtgacgatagaggaagattcagaagcatacagtatccggataacgaataatggggaactgccgaagccaaaggccagggagggcggagggctgtcctcccttcggagggcgttggagtcagaaggatgtacgatggtgacggtgtttgaaccggccttttgtctgaggctgcgtatgcctaagcggcaatcggagtgatattcaggcaaatgagcgatatcatcaggcgcaaaacaagagagaaactttgcagaaagggggaagttgtatgattcgtgttcttgtcgtggaggatcagaaaatcatgcagaagtattttgaatatatgctttcgcaggaaccggaatttaaacatgttcagacagtcgccgatgcggaggaggcggtcggaatctgcagttattctgccatcgatattgttttaatggatgttcagacttttcataatcatgatggcttaaaagcaggaaaggccatcagagaagcctgcccgcatacgaagattctgatcgtgacatcactgattgatccgaaggtgcttgaaagagccaaaagcggatgcgcagatagtctctggtacaaagatcatggcgaggaagaaatcaaagatgtgatccggcggacagcgagcggagagcatgtttttccggatgtatcgccagatgcggagttgaactggatcacaagcggtgagatcagcccgagacaattggaaatgctgagactctatatctgtggtttttcctattcggagattgcaagggaaatgaactgttcaactgcaggcgtcagatggaattttcaggaaatgataatgaaagcgggttatagttgtaaggaggatctgattgcggctgctctggaaagcaaactgattgtgacaaccctgaaatgacctgatatggaataaaatcagacaattttactgttactatcagaagtgatagtgaataagcctattttcctttgtataatgtgaatataaaaatattatacacagaggaggaagggaatatgagaaaacgtctgagttatttgttagtggtggcagtttttgtgagcatgctatctttaagcggatgcggcggcggaggcggcacaacaaagtctgaagcaaatccgtatgaaggcaaatgggttgcagtcgtggcagaagcgatgggggttcagctgcccatcgaagaatgttttgaaggagatttatctttcgaattgaacagcggtggtcaagttgtctttcatgctgacgaggaaacaggaaatggcaagtgggccgtggcggataacaagctgaccatcaccatccagggtgaagagatggttgcggatgtcggtgagaacacatttacttttgataacctgatggacatgggcctgaaagtcatcttcggtaaagaagggacagatgcaacaaatccggagaattacctgacagaggatgaactggcacttattggcgactggcattctgagacagtggaagaactgctgggagatggtccgcagacaacaatggatggcgtcgacaatatcaacgatgcactgcgtctgacctttgcaaaagattatacggtaaaggtggtttataaaggccaggaaatgggcacattcaaatggtctcttgtttatggcctttgtaatgttgaatctgaaaatccaagtgtttatgtagcgacgaatgaagatggttctctaaatgtcgattacagtgatgatgaggactttctgactttcaaatgtgtcaaagacgatgcgaagtaggaacatttttcagaactgcgcaattgttgattgcgcagttctgacagacaggaggaagcagaatgggactatttgataaaaaatactgtgatatttgcggggagaaaatcggattactgggcaactgtaaactggatgatggcaatctgtgtaaggaatgcgcccaaaaattatcgccatggtttgaggaacgcaggcacagtacggtagaagagatcaagcgtcagctggcgtaccgggagcagaacaaagagctggtacagaagtttaatgtgacacgtcagattgcaaccaaaacgtacaatgtctttattgatgatatacagggaaattttacgattgcacacaagctggatgtgaaagagaatcctgatattgtgccgttgtctgcagtgcttcagtgtaagatggatattgagcaggatcgcaaagaagagacatatacaaaagatggcaaaacggtcagctatgatccgccggtttataagtatgaatatcagtaccggatgaagattcaggtccgatccccatggttcgatgatatggattttcgtttacacaatttctcaattgagcaggatgacagagcggaaatcatggagattgagagagcaggctatgagattgtgtcagccctgacaggacaggcgccgatgggaatgcagggtatgaacggaatgccagtgaataatggcatgaactatgggatgcagggtatgaacggaatgccggtgaatagtggcatgaactatgggatgcagggtatgaacggaatgccggtgaataatggcatgaactatgggatgcagggtatgaacggaatgccgatgaacaacagcatgcagggtatgaacggaatgccgatgaacaacagtatgcagggcatgaacggaatgccgatgaacaacagtatgcagggcatgaacggaatgccgatgaacaacagcatgcagggcatgaacagtacccagatgaacaacagtatgccggtgaataatgggatgcagggcaatcaacagatgcagcagccaggcggcacatggaaatgtcaatgcggcgctgagaataaaggcaaattctgtgagtactgtggacagccgcgcccattctaaagaaggcattgtttgacgaggataatcatgatatacccagcctgtgattataggggcagagttgttaagctgtgttgcttccaccaaaagaaagtgttgataaataaatacataagccataagatgatgaataattaattaaacgaacaaaaatctcagagaatcttaagattttctgagattttttatgttcgatagatttttaaaatcatatgtggtaaattaaaaataaagtaatagaaaaaatgcgcattgaagagaggagatcactatgtggaacagacaggaactaaagagcaatgccagaataatgctgaaagccaattatttaaaaattgttattgtgagtgttgtatttgcacttttgaccagttctggttatcaatcggccaaaggagcggccaaaggcagtgatgcagatatcagcctcagccatttaacagatattcagtggtcattggtgatggcagcctttgtgggtattatgggtgttgtgatcattgcatttttagtgaatgctttgatagcggtttttgtatggaatccgttaagtgtcggctgcataaagtattttatagattgtcggtatggtaacgcagaatggaaagatattttatttgtttttagaaataattatgttaatgtgtgtgtgaatatttttttaaagcagttatttacctttctctggtgtttactgctgattgtgcctggaattgttaaggcttacgaatatatgatggtgccatatattctggcagagaatccggatatgagcagagaagaagtttttgcattgagtaaacaaatgatgaaggggaataaatgggatgcatttgtgcttgatctgtcatttattggttggatgattctgggggcacttacattgaacattgtgaatgttctttatacgaatccgtatcgctatctgacatctgcggaattatatcatacattaaaataagacgggcatgaaaattaagattgttaagaaattaaaagcgaaaatgaatcgttacctgggacgggtggcagacgacagagagccagaccgcaaacgttcagacgattgctttcgggaaagaatggcacatggcttctggcagatcgagagaatggcaattcggaatggagagttcttttattggtctgcagaaaccattgttttattgtagagcatatgctataatataaatggtatttataggggcagagctgtcgaaaggcagtgacgcaaagccaaagggactaaggtgttagaaactatgtcagccggttgcgataaagaattaccgttgttttttgttttgttttttttcagtcacctgtagagcacaggtgactttttgcttttttagtaaaatacagacgatttttagtacttttacaagcaatgaaaatcataagcccttatgatgtactgttgtagctgcatagaatttgatagccacaaattcgtatagaaaggatgtcagaggagagtgaaggatacagacagtatgacaatgcaggatgtgttggaaatgatgaaatgtatcagagagttttttactgtagtcagattggaaagtggatatgacacgatggatagtgaggaaacatactgtgagattgagtacctgaaggaagatattttctttgtaaaggcaaagcgtatagaaatagacgggaagccttacgtgataaagattaagcaggaagttgatgaaaaaattctgcaggcattgctggagtccgatcagataccggaacggctagcctattacaatgagaagatttatcatgattcattgacaggggcttataatcggcgttttttccaagagaagatgatatctgtaagtaagaataccggaattgcgatgatagacctggacaattttaaagcgtataatgatacctatggacatcatgcgggtgaccttgtgttgcagacaacggttatgacaattaagagtgtgatacgccgggatgatattctgattcgttatggcggcgatgaattcctgttgcttatgccgggaatgcagtctcaggtttttcatcaaaagctgcttcagatacatcagttcatttatcagtcggaagtgcctgaatatgggaaaatgcatgtttctacgagtatcggaggggttattgcccaaggcgaggagattgagcaggctgttgagcgtgcggataaactgatgtatgctgcaaaagcacaaaaatcatgcgttgttacggatgtagacgaggaagtgctatgaaaaaggttccgggatggaaaaaaatcgaaattgtctgtgttatcattgtagtggctttcatgtcctttttgatcggaatatactatcagtcaagaacggagaggggaagcatccggtcactctgcagtgggtggtatcagatgaaggacgggaaaaagattgaacttgaactgccttgttctgtgactgaggatgcggaaggaaaagtaattctttataatgatactctgacagaggatgacaggggactaattgtatccacaagaggaatacaggataatctggaaatcaggacaggggagcgtattctttatcattatgcggataaccagttccagaagaacaaacagatgaaaggaaagatgtgggcagatgtccgcctgccggaggagatggggcaggaaccgctatgctttatttatgagggaacagcaggtagaagtcttgatatacaggttccgatacttggcagtttttctacaattgtcgtgagacatcttcaggcctctgctttttcgattttaatgatcatcagtatgctgggattgggaattgtcgcagtaagtattttcctttataccagacatcggcagcttgtcgaaaaacgttttgtgaatgtcgcagtttttttgattatatgcagcttatggtgtatattggattctggaatttaccagatgtatgggaagcacagtgcagcaggaagtttagtgtctttttatgcatttatgctgatgtcagtgccgatgctgcattttatacagaatacggtaagtaaggaaaatcaatggattccggagatatggattttacttttttatgggaatgcgataggacagggcatcgtgaatatttggtttgcggttccttttaaaaatatgctgtttgtaacgcatttgatattatttacaggtgttgcagcgatggccattcttctatggagagaatatcaaaagcatcagacgcaggagctggagctttgtctgaaggcatttggtgtgttgggcatcagcggagtgattgcccttgctttatattggatgtatgccatctactggtatgatgcgctttttcagtttggtattttactttttatttcttttctgttctggggactgctttgtaaagtatccaatgatattcagtatcgtatggaacaggccgtatatgaaaggatgtctatagaagaccggatgacgggaatgaagaatcgaaaggcatttgaacagcagctggatcagcttcagcaggatgtaatgctgttggaaaatgctttgcttatatttatagatattgccaatttgaaaacgattaacgatacatatgggatgcagataggcgatgaagcagttattcggactgcccggagcattcaggcggcagaaagtgacgcatgtgagcagcatacagaatgttttcgtattgccggtgatgagtttgcaattgtggtgactcgtccgcagaagagaccggaagagtgggagcagatgataaggaatgagatgaaaaaagaatccggaagcaggtatcctgttcaactggaatttggctgcagttacctgaggaaagcggatggaacactgctttctatcagtgactggaaaatgcaggcagacagaatgatgttttcttataaatgaaacacggcggaggacagatatgatttacaacatggattttctgatttcggcaatggttattttgctgctgattttgtggcattttctgggacagaaaagagcagaggatttgaataaccgggtatttcttttctttgctgttcttggaacggcagatgttgttgctgaatttttcactaattactatattacttcatacaacagcgatatggaaaatgccgcagtcatcgtgacaacgatattttatctgctgcaggccttgcttcccgttacatttattttttacattcagacattgcatgagcagaaaatcatttcagctaagaagatgtttatatccggtgtgccaacccttgttctgattagtgtgattctgacaaatccatttacgaaaaagcttttttcttttgatgtgacagcgggatatgtgaaaggaccatggtatctgctgatgtatgtcagtgcgttggggcattttgcagcggcattattgcttattctgctctggcgcaaaaagcttgggcttcaaaaagaaaaaatacttttggagatttttgtgatatccggtgtcggtgtggtcttgcagatgttttgtcagtcacttttgatgactggatttggaatgagtcttggtatattggcattgttcattacgatcaacaatccaaatgccaatctggacagtctgaccggcttatataatcatctttatctgacacgaaagatgggcgaactcattgcgtcaggaaaatcttttcatattattacagtgtatctgtatcagctgaagcatattaacagggtagcaggggtacagggggagattctattttgcagcagatagccggacagcttggagcgctctgtggtcagaaggtgacccgtattaccggaaagcgctttcttatgctgacttcttctctggaagaatatgaatattattttgccaaattgaagaggctgtttgatgtaaataaggtgttggatgtggaagataaaaatatcgctgttccggtaattataagcggcattatcaatgctcagaagcttgaagaaagcggcctgatcatggaatatgcggaatatctggagtctctgacaccgcagagcggactgacagaagtgatacaggatgaccgccagacaatgaatggttttatgtattacaaacgggtggaacagtatcttcacaaagcaattgaggaagatctctttgaagtatactatcaaccggtatattctaccagggaaagaagatttattactgtggaggcgctgagccgcctgtatcatccggaactgggttggattgcaccggatgtgtttattcagattgcagaaaagaatcatatgattgaacagattacagatatgcagttcagacgtatctgcagattcctgaaggaaaacagggaattgatgtcacgcctgctgaacgtaaaggtgaatctgtcgtctctggatttgatgcggaatgactgcagcagtcattttatccgtatgatggatgaatatgagatcaggcatgagtggatacagtttgagattactgaaacagttgcaacagagtacagcgccagtctgggaatggttgtggacggattgacagcagcaggtattcgtttgtgtctggacgattttggctcgggatatgccaatctgaatacggtgatgcggcttccgttttctaccatcaagcttgaccgctcacttctttttgatatctgcaatgatgagaagcgcgcgcagttttaccagagtgttgtggaaacattccgcaaaatgaactatcatattgtttcggaaggcgtggagacaagagaagagatggaattgatcagcagatggggtgtggatatgattcagggatattatttctcgaaaccgctacctgaaaaagcacttataagtttaatgcagacagagacgatgtctgcttctgtaaatggggaacaatcagaaaaggtttgacctgattaaaaagcggattatgaaacgcatgatgggtaaatatacagaagaaaagaggcagaatccatgaagacaaaagcgaaaatcatgattgttgatgatgcagagatgaatcgggagattctgatggtgattcttggtgatgaatacgaatatgtgcaggcggaaaatgggcgtcaggctattcatattctgcagcaggatatgaatatagatttgatgcttctggatattaatatgccggaaatgaatggctttcaggtactggaccggatgaatacatttcactggattaatgatatacctgtaatcatgatatcctcagaggagaagaaagatgtcattgaacgggcttatatccttggagcggaagattatatccgcaggccatttgatgcgtttatagtgcgaagacgtgtacagaatatactcaatctgtatgccaatcagaaaaggttgatgcagatggttgcagatcagatttatgaaaaagaagagaacaataatctgatgattggaattttgagtcatgttgtggaattccggaacagtgagagcggagaacatattcttcatattcgtacagctacagaacttctgctgcgcagactggttcagaagacggatgaatatcatctgtccgagtcagatattgttatgattacaacagcctccgccttgcatgatattggcaagatcagtattcctgaaagtattttaaacaagccgggaaaactgacccgggaggaattcagcattataaagacacatacaacgattggtgcggatattatcaatcagatgacgacaaaaatggaaaaaccgttgctgcgcattgccggagaaatctgcagatggcaccatgaacggtgggatggacacggctacccggatggactcattggagagcagattcctatcgcggcacaggtggttgcattggcagatgtttatgatgcactgaccagcaagagatgttataaggatgcatatgatcatgaaacggcactggatatgattctggccggtgaatgtggtgcctttaatccgctgcttttaaagtgcctgcaggatattgcaccgaggctcagaatggacgcacagtatgacgcaggagattctctctaccgcagtgaagcagaccgtctgaccacagaaattatgaataaaacggagataccgagcagtgaacgttctcagcatatgctggaatccatgcaggagcggatgaatttttttgcctcattaaaaggtggaattcaatttgattatgattctgtttccagactggtcaatgttactaattgggatgaaccgccgcagtaccgttatacggtcaaaaatgttgcagataccaattgctttacctgcctgagtcagaaggattttcaccggttgaaagacgcattggatgcaacgacaccggagaacagggaattttcaatgagtatcatgatgccaaaggaaaatgagtatgagtggtgtgatatgagggtacattcgctctggtcggatctgtccccggaacattatatcggagcagtcgggcagctggtcaggccgcaggaggtgtcggcagatatcccaattctggatggccttgcagaaagtgatacagcagatggaatggcagtaaaggctattgttgatcagcttcggaagatttttgacattgttcggcttgtagatccgacagctaatgcagtgctggaattggatcataatggaacattgaggaaaaccgaccagcattgtgcggctttctgggagacaggggggaattgtacaaactgtatttcgacccgtgctttgtctcagaagacaatgctgaataagctggagtttaccaagacagatatgtattatgtcgtttccaaatatctttgtattaacggaacaccgtgtgttatggaaatgctgtccaagatgaatgaaggacgttggatcgatgcaaacggaacaaggtttttgttggataaaagtcgtggagagagtcgaaaactgttcctggatccattgacagctacatattccagacgctattttgagacatatctcactcatatggagggcatggaatgtgtggaaattatagatgtgaatcagttcaaacaggtgaatgatacatatggccatccggcgggggatgtggtgctgagagatattgcagcagctatcaagtcctgtatccgcagcagtgatatactggttcgttatggcggagatgaatttttgctgctatttccgaagatgtcggagaaggatatggcagagaagaacaaaagaatcaaagaagctgtggcgaatattgtatttacagaatatccgacattgcatctgtcagtcagtatcggcggtgtctgtggtgtccatccgataatggaggccattcgccaggcagacaaacggatgtatgagaataaaagaacgtcatagaagagagttagaagaaagttgatgctcgttgtgatgtatcagaagataatgcagcaggggctgttgggatgaaaaattacatttcccgacagcccctcttttgcactcagtcattttgagaaggatctttggactgagattctgcggctttccgatgattttcttttttttctgcatacatccgctggtctgcaagaatacggattttgccggtatcttctgtttccagaggatagacagcatagccgcagctggcaccgatatgcagtgtcttgccgtcaatttcataaggaagaagcagagactggacgatgcgcattttcgtctgcatgcagagtgaatcttccatttctgcactgataatcagtgcaaattcatctccgccaatccgaaaagccaagtcgttgctgcggatacattttaaaagtcgttctgccactgctttcaggagtttatcgcccatatcatgtccgtaggtatcgttgacaggcttgaaatgatccagatcaagatagtacagaacaaaaggaagctttttctgttctttgcggtgcaggacagaactgaaataacgctcgttgaataagccggtcaggccatccgtgttggccagattctccagttcatgtcgtttgccaatatcctgtgaaatcatcatgactttttgcgggatacctgcttcatcccattctacagcaacgacattcataattttgtaaacattttctgttcgtttgctgtattcgattttcatgataccgtttcctttatgcagcactttctgcaggtattctttgttcagcagatggctcatttttatattttctgtatcagataatacgatatagtttcttgcagccgtatcgagcagattctgataggagccggtttcgggatacaggttgttgctgctgtattcatggtattcatatctgtccttcaacaggtcaacgactgtatagcgatctacaatgcaggtcattccgtaaaatagctgattggtctgctctttttgggcttttagagcctgatgcagtaattcctgatgcttcagcttgtattctgcgtttaaggacgacagcctgagaagtaaaagaagcaggcaggtggcaagtacggtgattgcagcaatggtaacatgcattattttttcatccggggaattgacagcagctgtctgcacaattccgagaatgctccagtcattgagaccaacaggctggtagaccatgtaatatgaagtcccctgactgttaaatttagcacggcctttgacgaccttctgaaggtcatgttcaacggcatcgtatgtgttctctgaaaatacggcattgtccttcagaaaggtaaacagattctcatgtcctgacagaaactccgattgagattccagagaaagaatgacgtgtcccttggcattgacgagataacagctgcttttgtcgccatatacattattagatatcatgtcctctactgtagagacatcgtaactgacagcgacgcctgtataggttatattattaaggcaaaatggatggctcaatggaatcgcaaagacgaccttatgtttgccgctgctggcagtatagtcagaaatagtggggcattcggagctgtacatttcctgaaaacagttccggatactgtctgcagtgcctttccggttgttggctgtaagaaaatcacagtgttcgttaaacatatagaaatcactgtattgccagttgtttttccggtctgcaaaatcatgccataccgtttcagtattctcagaatctgatatacactgcagatattcatcccagtcagacaggacattccagttgcgttgcgtaaacagcgtaaaggtccggttgacctgttcataggttgccagaagatgttcagaattctcctggtaaatctctgtttgaatgaaggtgcggtactgataaattccaaacaggagaacgacaacaattagaataataagagtaaggaatttacatattttgttcataatgttctcctccttttgatggtgcggctactgagacatgtgaaattatatctgatcggtattcttttcaataagcaggattctcttacggttatataccagatgaagatacatggcatcctgagcgcgcagcgggtcgtgcccggcaattgcatctgcaatctcacgatgtgtttcgactgtctcttcgtgcagagccccactggttgtttcaacaaacagcggaatagagctgttaatgacaggaatcagacggggaacaacaacatttttgctgctcaatgcaatggctgtgtggaattcaatgtccttttgggtgtgatcatcatgcctctttaataatgcttccgtttcatcgcaaagtgcggtgattttttttatgtcattttcatcggcatgggcagcagccattgcagcaatggaaggttcaagcagaaaacgcacttccagcagatcatgaatcagcttctgtttatcgtcgataaaggtgaatcccagtgggtcctgcaccacccccggggatgaagcaatataggtaccggagccctggcggatcgtaacgatatttctggaagccaggagtttcatggcttcacggatggaactccttccggcattaagatgttcggaaaggacggtttcattaggaagcttatctcccggctgtagttttttttcaaaaataaatgtgataatgtcttctgatattttctgtggaagacttttttcttctggtgatgaaatcatcctatgattttctccatttctttggatttattcttcttataaattataataatggttataaaagggaatgtcaaaatgttaaaatgtacaaaaaagtagataataatttagataaaattccagtattgcttttttcagaataaatatatgataaatacatcagatatatttacacaaaaacaagagaaaaacacaatttgaagaaaataacagttaaaaggtctgatgtatttggggaaaatgaaacatcggatgaattaaggaggcaaaaacagaaagatggaagagacttttcgtacagaagctgccatgcgaaagtaattgattctgaacatttacagaaaaatattcatttatccataaaaaatcataaagccatacgtatatctattgtcacaacgatgtacgagtcctgagatgaatcaagaaggacaataattttttggaagcaaaaagacagcagatatgcaggaggtttatattgatgaagaaattaacgggtattttgatggcggtatgtctgacagcagcattaattgcaggatgcggacagaaagcaggaagagagaacacgcagaccactggcaaccagtcagcagcgcagacagagagtcagacagcgggcaatcaaagggaaacaggtgatttaagcggtgatgaagtctcagcggcgcagcattgtattttgctggcagggaagaacggcacatggcttctggcagacagagacaacggaacggtgtttacgacatctattccaaatgatctgaaggataatgacggcaaaaaaatcacatctgaaattttaaaagccggagattatgtggatgtttatggagacggcattatgctggagagctacccggggcagtatccgggagtcagcaagatggtcgttaccggtgagggtacggcagatgaagtgaagcagtaccaggatgtcattgatatggtttttgctgaaccggatacaagtacagttccgacagtgggtgttgtctacagctcatctcttggtcagaccatgtcattgatgagcgggccgggcaactctacatggacagcgccttcaggcgattctgaaacggacagttcagaagataacacagtgacagcatgcggttcagcagtgatgcagtggaagaatctggagaaaatgtccatggatgcaggtaagacggactttaccatcagctgtgatctgacaccgacaaaggtgactgtgcgccgttggaattcagataaatatccggcttccgtggatgatgatttggatgcattggcagaagaagtcaatgtagaaaagagtgctgacggagagtttgttgtcagagatgtggagccgggatatgtgtatgaagtcaccgtcagctgggaatacggagatgcacagtatgggtttatgacttcagagattcagtagtatctaacagagaatcatcaattgccaggcatcgtattttttatcaaagtcgtacagtgccaaaaacagttaaaaacggatttataaggatgacttttaagaaaatatcaaaaaagttataaaaaacggttgacaatactctataatcgcgatataatgatttacgacttatgggacagataagtcgtaacagaatatcgcggggtagagcaacccggtagctcgtcgggctcataacccgaaggttgttggttcaaatccggcccccgcaactcaaagacttgatgaatatcaagtctttttttgtgtaattaggaaattccgttggaatttcctattacatattgttcttagatttttggatgcagatgttttattgtaggagtacagaatggagagagagattaagcttgtagcattggatttggatggtaccacatttaattcagagaaggtcataacagagagaacaagggaagcgattgcggcagcaattaaaaagggtgtaattgttatgcctgccaccggacggcaaaagaccggtttgccggagagctttacttcaattccaggggtgcgttatgcactgacttccaatggcggagcggttgttgatttgtgggaggacagtattatctatgcggattttataccttataagacggcatgcagagtcattgatcatttaattcagatagatgcgctgattgagttttatcatgatggaaagtcctatgctgacagaaaaagttataacagagcacttcatgtttatagaaacttcccggattggttcaaggagtatattaaggtttccagaataccggtggatgatttgcgagaacgggtttattcgggaaagtttaatatagagaaaatgctggcctcttttgatgatatgatcttgagacagcaattgtttgatgaaatgcataatgacccggagctcagtgtggtattcggcaatagttttaatgtggaaatcactgctgcgacagccaataaaggtcatagtctgctgaaattggccgggaaacttggaattatgccggaacagatcatggtttgtggggacacgatgaatgacagaaccatgtttgaggcagcaggcctggcagtggctatgggaaatgccgatgaagagattaaggccatggcagatgacgttacactgtcgaatgatgaggatggtgttgctgcggccattgagaagtgggttctttaattatcgaaatctccgccgtttattgtctgctgtgaatgagctgacgaatgatgtacagtacaccatcttcatcatttgacaatgtctcaaagttgctgatggcttttaaatcagggtgagcattggccatagcgtagctgaaatagccctgtttcatcatttcataatcattgagatagtctccgaaaaccatggtttcatccggtgaaataccataatttttttgaagtgcagcgagtccgcagcctttgtttgtggcggcaagactgaggtctgtccacatgtagccggccagagtagctttaaaaggtgcacggacatcagacagagccggaaatgaattgctttcggcacctttgaagtcacagacagtcactttgcttactggggcatcaatttcagagatgtcatggatatactgaactttcttatagtaacggcctatttctttgcgggcatcatctgatgtctgatcgaagagataggccgttttgaaaccggagagaatcggaatggcgccgggaacctgacggcagcgcccgagaagataagaaagggcatccgtatcaagaatgtcctgatgaaccagcttgtcgccgttgacgagacatccgccgttttcagccataaaaacaagcgtgtccatgcaactttcaaactgcatggcaagggttgggtatggccgcccgctggcaatgacaaaaagaattccgagtttgtgaacttgattaagtatatcaaaaaaatcacggggcatctggtcctgactgttcagcagagtgccgtccatgtcagtggcaatcatgcgcacatgattaagtgaatgctgcattgtaaattcctccaaaaataaattaccgggttgaagtatttgaatgttaaataaggatgttcgatttacaatgtagcatatattattgaaaatgtatagaggaaaagagtgctcgttttgaaggaaggacttattattcgatagaagaatggatggaaatagagtagaaaacagataatgccttgtcatctgaagaaatcctcgttatacttaaagggcgacaagtgagtagaatttggcatatactttgcaaatagcgtggatgatacaactatacaaggaggcacataatggagattttaacaggcgacatcgtacggttgaagaagaagcatccctgcggcagttttgactgggaagtgcttcgaagtggtgcggatttcagattaaagtgctgcggctgtgagcatcaggtgatgatggctcgcaagttggtggagaagaacattcggagactggagagaaatggggaagaaatgaagattacccgataggtgacgaaatacgtagcattttggaggttagctctgaacagttacgaaaattttatatcataattatgaaaaaaagtgcttgctttgcacttttttttatggtaaactggataactgtgatatgttatatattaattccttgctctccacaatgggagggccgtgaagtccagaaggaggtgcactagcatgaacaaatacgaattagcagtagttcttactacaaagatcgaagatgaagaaagagcagcaagcatcgagaagatcaaggaagttatcgctcgttttggtggcgttgttactaacgttgacgaatggggcaagaagagacttgcttacgaaattcagaagatgaaagaaggtttctactacttcattactttcgaatccgattcaaactgtccaaatgaagttgaacagcgtgtccgtattatggagaatgtaatcagatacttatgcattagacaggacgcttaattagaaaaggggtaagtctaaatgaataaagttattttgatgggaagattaaccagagatccggagatcagatattcacagggtgagcgctcaacagcagttgcccgttactcactggcagtgaaccgtacatttaagcgtgacggtgagccggatgccgattttatcaactgcgttgcttttggccgtcaggctgagttcgcagagaagtattttcataagggcattcgcattgtgatcacaggcagaatccagacaggcagttacaccaacaaagacggtgtgagagtctatacaacagatattattgttgaagaacaggaatttgccgagagcaaagcagcaagtgatcgcaacagcagtgattttgcagccaataataattatggcggcggttatcagcagtccggcagacctgtaccaagtcaggcaccatcggatggttttatgaacattccggatggcattgatgaggaattgccattcagctaaaataggacatgatctgttatgaatgaataacagaaagaattgaatttgagaaggaggttttgatatgccatacaataaagaagaaggcagaggcactcagatgaagagaagacctatgcgcagaagaaaaaaagtatgtgtatactgtgtagataagaatgcagttattgattacaaagatacaaacaagttaaagagatatatctctgaaagaggtaaaattcttcctagaagaatcacaggcaactgtgctaaacatcagagaaagcttacaacagctatcaagagagctagacatatcgctttaatgccatatatcacagactaattgaaattcgggcatccggttcagcaatgaatcgggtgccttttttcgattaggtggaaattacggcgaaatcgctgtctgatctaaaaaaggcactgcgtgccaaaagcccgtttctaccatatttatggttattcagtttttgtataaacgtgccgaaaagggttatttcagtgtcaaaaagaaatgtggtatgctaactatgaaaagaaatacggaaagcaagatatcgtttcaacagatatcacgaatgatttcataaagattattaggaggttttgcaaaatgagcagagaagttgttattgttgcatatggtcgttcagcagtttgtaaatcaagaaaaggttctttcgcaggtactcacccaatcgaatattccgcacaggttttaaagggtgtactggacaaagtgcctcagttagatcgttctgaaatcgaagatgttatcatgggttgtgcagtacagcacggtacaacatctatgaatattgctaagagtgtttgcgcaagagcagaactgccggaatgcgtagcaggtcatacaattaaccgtttctgttcttcaggtcttcaggctatcgcaacaggtgccaatgcaatcgcttgcggtcagggtgatgttatcgtagccggtggtgttgaaagtatgacagatacatacgcaccatatcctgtagaatttcaggatgcatggttaaatgagcatgcgccaggtgcttacatgggcatgggtatgacagctgaaaacatcgttaagaactacggcgtaacaagagaagaaatggaccgtatggcttacgaatccaacatgaaagccgcaaaagctcagaaggaaggcaaacttgctccatctatcatccctgtaactgttgttgacaaggatggcaacgaaaaggttgttacagaagacgaaggtatccgtccaacaacaacaatggaaacacttgcaggtcttaaaccttgcttcatcccggctgaagaaggcggtacagttacagctgctacttcttcacagacatctgatgcagcagcattcgttgtattaatggctgctgacaaagcaaaagaacttggtatcaaaccaattgcaaagatggtatccttcggtgttgcaggctgtgatgctacaatgatgggtcttggaccaatctatgctgtaccaaaggctctgaaacgtgccggcaagacaattgatgatatggatgtcatcgaactgaacgaagctttcgctgctcaggctattccatgtatcaaagttctgaaaatggatcctgaaaaggttaatccttacggcggcgctatggctcttggtcatccaatgggcgctacaggtgcattccttacatgtaaagcacttgattaccttcaggataacaagaaaacaacagctcttgttacaatgtgtatcggcggcggtatgggcgcagcagcagtatttgaattactgtaagataaaaataaatgtagaatcgttcagagctgacattttatgatgccagctttgggcggcttaataaagaaacttttaaatgaacttttttacagaggtgtgaataatgaaagtagcagatattaagaatgttgccggtatcggcggcggtgtaatcggcggtagctgggctgttctcttcgcaatgaagggtctgaacgtaaaactttatgatattaatgatgattgccttgcaaacgataagaagacaatcgtaagcaaccttgaattccttgctgaaaacggtgcaattgaagacaaggatgcggttcttgcaagaatccagtttacaacaagcatggaagaagctgtaaaggatgctcagtttattcaggaatccggtcctgaaagacttccgatcaaacacagcatgcttgctgaaatcgaaaagtatgcgccggttgatgcaattgtagctacatctgcatcaggtcttcctcttggacagattacagaacatgctgtacatcctgaaagatgtgttggcggtcatccttacaacccaccacaccttatcccactcgtagaaatcacaaagacagaaaagacagacgaagcaaatgttgaacttgcaaaagaattctatgaatctcttggtaaagaggcaatcgttctgaagaaagactgcccaggttacatctgcaacagactgcagcttgctgtattccgtgaaatggttgaccttgttgaaagaggtgtttgtacagtagaagaagctgataaggctctgacatttggccctgctatcagatgggcaatctttggccataacatgatcatgcagttaggcaacaaagatggtcttaaaggtatgatggatatgctggcaggtggctttaacctctgtgcagatatcgctgcatgggatacaattcctgccgattacggtacaaaggctcagaaggaaatggatgagatcatgaagaaccttccagatgaagtgggccatacaaatgcagaaatcgctcagtacagagataagatgctgatcgatatccttaaactgcatcataaattctaataaagtacagatgatttcgaaatcggaggcattttttcgttcagttatagaggctgtgaatttcgaaaatcatctgttcgttatctaaaggggaacaatgcgatacagattttgcctgtctcacagttgcttccctttttgcgtttgttctctcttttaatgaagaatattgattggatttgaggaggttttggtatgttgaatatgaatgggcctgtgaagatggcatcctacgatatggctggcaagacggcggttgttaccggcggtacaaagggtatcggtaaagcaattgcgctggcttttggtcagtgcggcgccaatgtggttgtggccggaagacatgaggatgaatgtactgctgttgcagaggcgattacttctgcgggcggtcatggtaagggtattcgtaccgatgtaagaaatattgatgagatcgatgccctgattgcaggtgcagcggagacgtttggtggcgtggatattctgattaattgtgccggtgtcgcgattacgaaaaagattcttgatctggacgtggaagattacgacatggttatggagacgaatctcagaagtgttttgtttgcctccaaggcagcggcagctgtgatgaaggcatccgaaaagggcggaaagatcatcaatattgcttctgttggcggcttaaaaggcacaagcgcgctttcactctacggtgcctccaaggccggtgtgatcaatctgacgaagaccatggctcttgaatggagtcgttacggtatccagacaaacgctgtttgcccgggctatgtggtgacggagattaataaagctgaatttgaaaatgaaaaattcagagatcatgtgttgaagacgattcctcagagaaggctcggaactgtagatgaagtggcagccctggtactgtttttggcatcggatatgtccggtatgattaacggtgaagcaattgtggctgatatgggagccatctgtggctaaatccaatccaatttaattttgtaaaaagcatccattaatggctgttctttgaaaaaatattcaaagagcagcttctttttttgtataagcaaatcacgctttataacaaaaacagatgaccacaaaaggatgttatgaatgtttgtgataaatgcgtgccaaaaatgcaaaaaatagagaatttcgtcgatgtgatgaatgaaaaaaaggaataagacaaaaaagtatgaaaattctgtgtctaaactgtgaaaacttataactatttgacataaatctgtgcttgtttatgcatttcacttatgcatattgttctgataaaattgtattcagtaagatacaaaggagaaaaataaatcatgagtgaaatgaaaacgacaagtgctaagaaaacatctgggtataatttcggcttaaaaggttggcggattatcggctttgaaattgtgatgttattctttatgacaggtattacggtggatggtctcaataccatcgttccgaagatggcagcttaccacaactggagttcggatgtattgctttccatttctacaccagcatcaattgtagcattatttgcctgtgttatgtgggctgcatttattgagaaaggcggcttaaagcgtgtcacgctgattacgatggtacttgcaggtatcagtttgattgcctatggtaattcggtcaacgtggtgatgtatgcgatcagccttgtatgtgtagtcacatttattaatgcttttgcatgtaactgtggttttgcgattgttgcgaattggtttccgacaaagtctggtattgcgaatggtatcgcaacgattgggatgaatctggccagcgcgattatcaactgggtgctgacaggtctttctaatgtatttgaaattacaggtgccctgacggtgcttggtatcgtgttatttgtcctggcaggtcttgtagcgctgtttgtgaagggaacaccagaagaagatggctgttatcctgataatgatcctgccgttgcagagatgttaaagaacgaagaaatgcctgcagaaattggcagccagttctcttataaagatgcaattaagaataagtatgtatggatgtatggtattggcaatggcttcttcggtcttgcaacagtgggtattatgtcacagcttttatccttcttccaggaagtcagaggctatgatgccagcagtgcattgacgatgttgacaattgctgccgtgatcggtattgcaggtgcatggatctggggcgcggttgaccagaaacttggaccacagaagacttgtctgatttttggtatctggtatctggcaggtattattctgctgatttcgccgttaaaaatcggtatgtatgttggtttgatcatgctgggcgcgtctattggtggaaatggacagtttggccctgtactggctgcacaggcttttggacgtaaagatttttctgtttccttttcatgcatgaatatgatcagtggtattgtcagatcctgttcttatgccgttctggccgtgttacattctatgtcaaatggttattctgcaccatacactgtttttggcattatcgcagttgtgggtggttgcatgatctttgccatgaaagaaaagaaaaaagaggatgtggatgaagatacagtcgttgcttactaatgggtaaaaattaaaataaaagaataaataaaaaaatatcccaggttatttgtgaagacttcgagatgaagcgatacaaatcatcggggatatttttactttaagcgcgcaaagagtcgtttgcggcgctttgcgcttgtacaaaaaattattttgtgatctgaggggtatcaaatttcttggtgcagtaggttaagcccaggccacagatcattgccagaataatgccgacaaacaatgtgaaagcgagacctgcaacgttgctgccgccctgagagaaggtcaggcagacaccggcaaagataaacggcataaagccaagcggtgttgcacccagcagtttgatgtggatgtacatggtgatggctgtaccaacgaggatggccacaaagcttgccatttcagctgacatatgacatgtgctgccgaagaagttgatgaggataaagtcgaactgaccccatgccagaccgcaaaatgcggaaagaatcatacccggcacctgctttggtgcgccgcccataccgaagtaaatagccatgcagacaaacatgatccagggcacgccgaatgaaccgaagtaaacagtgtaaaagtgattaaaaagcgcagaccagaagctggtccagatagcaaaacaaataacagttttgtgactcatgaaaaatctcctgtaaataatcgttataataatcgtgtagcaattcaggggcagaatattcgcttccatagccgtacggttaatcagattctgtatatgcatcggtgtgtaagcgtgtgtattcattcttgccttccttattaataggctagccgaagatagtcattgggttagctgcaagaagcgcatcgatctgttcttctgtcatgccgcgttttgcaagaccaggaagaactctggcaccgatatctgtgatattggcccatttcatagcttcctgcataaatggtgtcatgatcagaccacggccgaggttgacattgacagagtcgtggccgagaaggatcttgttgccgtagcctttgtcagaaagcgttttaatcagatccatacgctgttcatctgtcggtgtatggaaaagttcgccttcaagaccgaaacgatccaggttgacgtaaacaccctgcttcagaacggcctcgtggtagtcaacatccgtgctgccgcacatatgaccgatggcgatcttggacggatcagcaccgttagcaattaagagctgtgcctgttctggtcccattgtaccgagctgtgtgtgggtaatgataacgcatcctgtttccttctgagcacgtgcagcggctttgaagaagatttcctctgtaggtgtgatttcattgaagctgctggccagtttgatgacgccggctttgatatctgtgccttcgattccttttgtaagctcagtaaccatcatttcgtagatttcttcttcaatgttagcgaagcctcttctgaaattccagtaagcataagcactctcagcctggaagtaataaccggtagaacagatgatgttcatgcctgtcatatcagaaatctttttcagaaaacgtacgttacgaccacattcgttggtggttgcgtcaacaattgtattgataccatatgcgcgtgcatcatcaaccgctttcagacagtctcttgtgtattcttcttctttaaaaccaccgagtgtggcatcaccctggaaaccacagaaaccgaataagaaatgttcatgcatcagtgtacggccaagttcagaagcagccacaggacctgttactgtattaacgtaattcattgtaaatcctccttaaatagtatgatattgtctctaatgagctactattaagtataatctaaaaaaaggggtaacgccaatattctatggtaaaatcatgaaaatgatttggtataggcctatgcactctgtgaaaagttggcacggttatcgaaaaaatgaataaaatgcagaatttgttataaccatttgttataaaagcaaaacataaagtgaatttccattatttgctatagtttgttaaaataatctcaagattaaatgattccaaaaaagcgcgcaagggagaatttatttttaaacgctattttgcaacaaagttattttttgcacgattatgcatgaacatgaaggagaggatttaagatcatgagtgataataaaaagaacgtcgatcttaacaaagtaagttataattttggtacaaaaggctggactgttatcggttttgaaatcgtcatgctgttctttatgacaggtattacagttgatggtctgaacacaatcgtacctatgatggcagagtatcatggttggaacccggatgttctgttatctatttcaacaccagcatccattatcgcattgtttgcttgtgtattatgggctgcatttattgaaaaggcaggtcttaaaaagacaactatcattacaatggtgcttgccggtatcagtatgatcgcttacggtaactccgtaaacatcgcaatgtacgcagtatcacttgtatgtatcgttacattcatcaatgcttttgcttgcaactgtggtttcgcaatctgcgctaactggttcccaacaaaaaaaggtatcgttatgggtatcacaacaattggtatgaaccttgcatctgcattaattaactggattctgtcaggtctttcaggccagttccagatttccggtgctttatccatccttggtggtgttgttattcttctggctatcttacttggtatctttgtaaaagcgacacctgaagaagctggctgctatccggataatgaccctgaaattgctgcaatcatcaaggcagaagaagaaggcgtaaaggaaatggaaaaggtttcctatgctggtgctcttaagaataaatatgtttggatcttcggtcttggcgccggcttcttcggtcttgctactgtaggtattatgtctcagttagtcagctactttatggctgcaagaggttatgaattaacaggcgctctgtctatgctgacaatcgctgctgttatcggtatgatcggttcatgggcatggggtgttgttgaccagaaacttggtacacagaaagcctgcctgatgttcggtatctggtactttatcggtatcgcattcctgatcgcacctccaacaccttgcatgtacattggacttttcatgctcggcggtgctatcggcggtaacggtaacttccttccatccctggcagctcaggtattcggtcgtaaagacttcaacgtatcttatgcttgcatgaacatgatctgtggtatcgtaagatcctgctcattctttgtacttgctgtactgcgttcaatgacaagcggttatacagtaccttacgtggtatttgctgttatcgctgttatcggtggtatcctgatcgtagctgtaaaggaaaagaaagctattcagtaaattgaataaaatgactatagtcgtatagtcaatgcgtgtatagaaagccgcagaattaaagaaatttgattctgcggcttttctttttttcttcaaggcaaagtgatatgtaaatccggtgattatgaggatttgacataatgaggaggctattatgaattggcgaaagtggtgcggcgatgctataatagtaccagtgaatgccgggataatcggcgaaagacattcgaacctgaaagaggattagaaaataatgaaaaggagaaaaaggtgaaagtttactatattgatgaagatattaagggaacctgttttctggttcagggagagcaggaagcgatattatttgaccctgggatggcctactatggtgaaaccgttgtacagcgtgtgagagaaatattaggtacgcagccgttgcgggccgttttcctgacacattcccattatgatcatgtggctgcactgccttatgtcagacaggcatggccggagattaaagcatatgcagcagaatacgcatgtcatatttttgaaaagacaaaagcaaagcagatgatgtttcatatgtcgaagacagcagcggaagaatcacatcatgaatggaagagtgacgattacaaaggggagctgttgtatgcggataagccgcttgaagatggcgaccgtattgcgttgggtgagtttgtagtggaagtgatcgagacgattgggcatacacagtgctcggtatccttcctgattaatgatgaagtgatgatctcatctgagacgatcggtctggaaggggattttgaagggggatatgtaccggcattcctgattagctataagaagacagtggacagtctgcgccgtaccagagaggcagatccgaagcagctttatatgccgcaccggggacttgtgattccggacgaacgctattggaagtatatggagaaaggccttgcggcaacaaaagatgagattatccgtatcctggcatcctatccgacgctggaagcgcagattcttgagatggaagaagttttctggaagaaagcggcagatggcgcatggccgagagaagcctttgatatgaatgcgaaagcaatgctcagaaccgtggcggcagaatttcccgaagaattggggtgattactgtcttccttgaaaacgcgtccaaaaaaatggacgaaatgttttcaaggaggacagcacacccttaattaaggatatagaattaaagaagagaccgcagcagaattaaaaagcagagctttataagttttttaaaacatttcacacattttttcgtgtgcgttttaaaaaacttataagagcatctgctggtgaaatctgctgcggtctatttattcctatttagaaagctttttggatggagccggacgatatggttttactggcttctttggatcgaatggattttcgatttcgccagcatcgacttttttaaaccattcggcagcacggtctgccataccagcccaatgttcggctgtcattggctcctgcatatcggttgttgcgtaacggtaatcagcaatacggctgatgtatttttcatcctgctgtgcggaatgttcgtcaccaagatcgccagcagccacacgaagaagagaaccatactgttcgctgactgtgtgaagcttcagatcctcaacaaggagtttcttcagaggacgtttagccagattggacatgattgtacggttttcgtaggacatgagtttccacatgcgagcgatttcccatgcacgttcaacagctttgcccttaggaacaacttcgctgaccataccatgatcaagcatgtctttagctgtgaactgtcttgttgtcatcatgtagtagttaccacgttttgttccgaagtaatgctggcacataagacccatagcatcaccaggtacaagacctccctgagcatgaggaacttccataacagtatcttctgtacagatagtcacatcacttaagaaagcggaatcccagtggaaaccaggaccaggtacagcaccgattgtaggaacatcaagatcgaataccatgttcttgatcaggtttgtatcatcaaagtactgatgctggaaacgctgtgtaggaagttcagaatatgtttcccaaccgttaggatcagattctaccatccagctgtcgccgatatgagtgaagatgatgatttcgttcttgaagtcaagagaaagaactcttactaactggctgatggcacgatgggacataccgctgtggtgcatagggccatcgtttgtcttccatgttacctgaagaataccatcttcacggtacagatctgcaaaatctttgaaccattctttgtattcttcgagttccggcagtttggcgtaaggtgccattggtttattgttacacataatcatacctcctgataattgtataaaaaggcgatcttctgtcaaggaagaccgcctttgaggtgaaatcggtcatcaataccgattgctgttattatttatttaatttcttagctggagctggacgataaggttttactggcttgcttgtatcgaatgggttttcgatttcgcctgcttcaaccttcttgaaccagtctgctgctctgttagccatgccagcccaatgttcagctgtcattggttcctgcatatcggttgttgcgtaacgataatcgttaacacggctgatgtatttttcatcctgctgtgcggaatgttcgtcaccaagatcaccggcagctatacgaagaagagaaccatactgttcgctgactgtgtgaagcttcagatcctcaacaaggagtttcttcagaggacgtttagccaggttggacatgattgtacggttttcgtaggacatgagtttccacatacgggcgatttcccaagcacgttcaacagctttgcccttaggaacaacttcgcttaccataccatgatcaagcatgtctttagctgtgaactgtcttgttgtcatcatgtagtagttaccacgttttgttccaaagtaatgctggcacataagacccatagcatcaccaggtaccagaccgccctgggcatgtggaacttccataacagtatcttctgtacagatagtcacatcacttaagaaagcggaatcccagtggaaaccaggaccaggtacagcaccgattgtaggaacatcaagatcgaataccatgttcttgatcaggtttgtatcatcaaagtactgatgctggaaacgctgtgtaggaagttcagaatatgtttcccaaccgttagggtcagattctgtcatccagttgtcaccgatatgagtgaagatgatgatttcgttcttgaagtcaagagaaagaactcttactaactgaccgattgcacgatgggacataccgctgtggtgcatagggccatcgtttgtcttccatgttacctgaaggataccatcttcacggtaaaggtcagcaaagtctttgaaccattctttgtattcttcgagttccggcagtttggcgtaaggtgccattggcttattgtcgcacataaataatacctcctgtgttttacatacattctttaaaaattaatttaatgtttgcgtttttttattcgctgttcgcttaagtgtattatacaatagtccatctttgatgggaaatgtcgtttccaaacaggtttatgcaaaagacgaataatcgttctttcactttctgcatgaaagttggcacgggaaaattgtgaaaaatgctatgccaaaaagcagtgaaaacatgaaatattgttatgttttttttacataacgcttttttatagatagaatttccatttgaagggtaaaattgttatactcaccttgaagcaagttatactatacagaatacgacatattagtttacttgattgttacaaacattaaaaaaggagcaactgcactaagcaattgctccaaccctccccctgattaatccgcaggagccagattaggatttctgttttgtatataagttgagaaactgtcaacaaatacaggaatggagatatttggatttttctttttccagataagattgagtgtaacataagcaaaagaatctgtcagaggaactgttctgagagagccaatagaagagagcagatactcaggcatgataaagaccccttcgttgatgctggcgcagaaagcagcggtttcaatattggggatttctcgtacaatattgagttgggcaccggctttcttgaaaatctgcttattaaagtcactggtgatcggattcgcctgaggtgagaaattgatcattgggaacccggacagatctttgatagaaagtgagtcacggttagccagagcgtgcgttggatgcatcactgcgatcaacggactcttcatgatcgttttactttcaagaccgatgaggtaattcttatctacatgggtgacgaaagcgagatcagtgagaccgtcattgagctgtttaacaagaatatccagggcatcactggtcatagagagcttgatctgtggatggctggcggtgaaccccatgacaaaatccgacaggaaagactgggaagctgttccaaggaaaccgattttcagttctccggtggaggttgaagaaacttctttgatcagatcaagggcatgattgtaacgctggatgatttcctgagcttctttgagaaagatttcgccgacggatgtgagatgcacgttgtgtgtatcccggataaaaagctgagttcccagcgtttgttccaggtcatgaatatgacggctgagagcaggctgtgtcagataaagctggttggcagctttgctgtagttcagcagcgtggccagtgtgatgaattcgttaagtcgattaatatccataaacaaaagtgctcctttcaaaaagtgatgcctttaccataaatctatcagcaaaaatgctgatataattaagcaaacgtcagaatgttgatgtaaaattcataactaaaccatatcataattcgaaaaagatatcaacattttgtcgaaatatagataaaatgcattgcaaatgcggtgtgagaaactataataataattgcaagtcaatacaggaggaagataaagttttaggtaagagatgtgtcatctgtgcattcccatcccgctggtatatgggtgatggcagcaaggtgcgtatggttgcattcatcgacaaagatgatatgaatgatgtaccggaccgtgtttacaaatacggtacttactaaaattcaattttaaatgagttggagtataataaaaattaattatacatataaaatgaatgggaggaattaactaatggcaaaagataaaaaagcagttgtagccattgcgaaagaacctactgtccaggaaagtgtcactaaggtattcgatcttcttggcggcgttacaaacatgattaaaagaggcgaaacagttatcctgaaaccaaatgcaggtcatgcagaaggtccggatacagctgtatgtacaagccctgaaacacttcgtgcagttatccgcgaagttaagaaagctcagccttcaagaatcattgttgcagaatcagcagctatcggctgtgatacaatggaatgtttcgaagtatccggtcaggctgatgtagcaagagaagaaggtgttgaactttacgatatcaaggcagaaaaagaccttgttaatgtagctgtaagaggttacaaatccaacattaagagatgtaaaatccctcgtttactgcttgaagcagatcatatcatcaacctgcctatcatgaaagcacatgcttccatggtattcagctgtgcattaaagaacatcaaaggtactgtacaggatcaggtacattcccagatgcatcagcagaacctgacaatggctatgatggatgtttggtgggcagtacgtcctgatatcaacattgtagacgctatcaatgtagcatccggttacagcccacatacaccaactcctctggaagtaggtatcatcatgggtagttacgatccagttgctcttgaccttatcgcatgtgatgttgtaggtatcgatacaaaccaggttgactacttcagagcagctgatgaagctggtcttggtacaacagatcgtgacaagatcgaagttgttggtgaacaggtgaaagatgtttacaagaagatgtggattccataccttggcaacatggctgaccgttggccagaatatgatatccgctgcgagggtgcatgctcaagctgccaggctctgcttgcactgaacatggaaacacttaaagcactgggtatctatgaagaaaactctgataagacaatcgttgtaggtcctagaaatactattcctgataagccaaaggataagatcatccttcatggtaactgtacaaagagatttgcagataaaggtatgtggattccaggatgccctccaggagaaacaggtctttacctgacaatcaagacaggccaggttgttgatggtgaaattccaggctgtatcgaaaatattattcgtcctagcatggaagctgaccatccgaagtggcgtgcatatgtagaacagaaagcaaaagagttctacgagaatccggagaatcagtaaaatggcatttgcgtatgttccaatgtctccagatgataagaagttgctggaaatgatttttactgatgaattcatgcaggcggagacgaattttgaagcttttagagatttccagtcttccagtgcggtatttaccaactggaaatccgatataatggtttataatgaggaagtgtttgatgggtttgtcagagaaagtacacgcttcacatcatgggatgaaatggtacgtacggctgcagaccgggcattttccgaaaaagacgaataaaaagaaggttcgcttcaattttttcggaagctgatctgatacgcttacgtttctcaaacacgcgtttttatgacgcgaaacgtttgagaaacgtaaggtatagatcagcttaaagaaaagattgaatgcgaaccttttattatttaatatagaagacaattgttcaatctcagcttgttttgatgaaaaattggctgaagcggctattgttttcttctttatataatgatactataaatttaacgtaagcgggagttgatttgcatggctctaaattgtctgagagggaaggagaatttatataggcgcgatagatgcaattacgaaggcttacataagaaaaaatgaagtatttgcagatgctttcaattactttatgtatgatggtgctcaaatgattcaaccagatcagttaagggagttggatccgacggagattgcaatactttttaatgagaatgatacacaagataggcaaagtactaaaaaagaaattattcagaaataccgcgatcatttgaaatctgcagcaatcatggaagatggagagacggcatatgttcttttgggtattgagaatcagacagatgtgaattatgcgatgccagttagaaatatgttgtatgatgctttacagtatgtgagacaagtaagcagaattgctgatgtacatcgtagtcaaaaaggtaaggcagaacataaaaatgcaactggtgcggagtttatatctggttttcataaaaatgataaattgattccggttattacattggtactcttttttaatgcagatgaatgggatggaccgagatcattgatggatatgatggagattacaaatccaactgtacgacggctagtcggagattatccgatttatttgattgacccaagaagtttagcggatgatgaactgaaaaaatttcattctagtctgagagaagtgatgggctgcattaaatattcgaatgataaagataaattggcggcttttattagtcataatccaagaatgaatatggaagtagaagcagccagagtcatagaagcaatcaatcatgtgccaattcggctggagaaaggagctgaacagttcgatatgtgtaaagcgattgaagagatgatagaagatggcaggcaagaaggaagagaagaaactttaatgcgtattaatcaattaattattatgctgtcaaaagaaaaccgcagtgaagatattgttaaagcggctgcggacagagaatatcaggaacagttgctgaaagaatttaatttataatagcgttgaaaaataatagtgcaagaagaattctgcttacgttttctaaggataaaaaaggtttgcttgagattttctgattatactgaatcgtgccaaaacttttataaaacatttcgcggcgtaagacgcgcgttttataaaagttttggtatcgatcagtgttcgaaaacttcaagcaaacctttcaatttttattcttcgtccataattttgagatcgtcagcgatgatcagtgttggctcaacctgtgcctgaatgtcttcaggtgttttgccagcacggatttcaacaagcttcagaccttctggtgtcacgtcgatgacacactgctctgtaacgatgtggttcacacaaccctgagctgttaaaggataagtacatctctttaagatctttggttcgccttttttggttgtgagttccatggcaacaataacttttcttgcaccgttgcaaaggtccatagcaccgcccatgccgaatgcacggccagggcttgcccagttggcgatatcaccgttttcagcaacctgaagggcgccgagaacagtggcagccatacgaccgcttctgataacagcgaaagaataagctgtatcgaatgcggaagcacccataactggtacgaagttgatgccgcctgcgttctggtaagtatcgcagatagcaagtttcttagcaacaggaccgacaccgatcataccattttctgtctggaaagcgattgtcggatctacataatcactgcaggcacttggaataccgataccaagattaacagtgtcaccttcattaaaatactgagcagctcttctggcaataaatcttctgttatccatcttacataccctccaactgatttctcttgattcgaccaataatatggttctgttcatggctgtctgtgtaaagcatatcaacgtacatagcaggtacctttacatcatcaggagaaatttcgtttaagtcgcagtacaggtcgcactgtacgatggagatatctgcacatgttgccataacagggtgtgaagctgtacctgttccgtggtaagcaaggttgccgagaggatcggcacgacggcatcttgtaagtgctacatctgcatggatggcttcttcaagaatataacgttcgccatcagatgttgtaacgatctgtttgcctttttccatatctgtgccaagacctgttttggtaagaaatccaccgataccggcaccaccgtcacgcatcttttcaatgaaactgcccattgggaagaattcaatttccagtttgccttctgcaagcaacttctgagcaacagggtttgtaccgatatgagttgtgatcattttgtcaacctggccattttcaatcagacggccgattgcgaaacctgggttgcaggcatcaatagagcagattgtaaggtgcttaacaccgctttcttcaagcatatcaagaagatcccaaggcatgtaagcgccggcctgaccaccaatggcgattgtctgaccatccttgaaacaagccatgatttcttctcttgttctgacttttcctctttcgatttccatcttatgagtctccttcctgtttttcaaaaattaaaattatatttttatttgttttcaccaaatattacttatagactgtaaggcttcgagccttgacagctttcgtcctcttcatcttaacatataaataaaagactgtgaaataattgataaacccaagtctatgcaaaatgtgcataaccatcatgcatgatttggcatgatgactttgggagtaaactcaaaaatggttatcgagggagacgggcatgaagttctttaacgacagtatccacccagttttcaatttttttgacatcttcttcggacattttgttcggctcgtagaaaaaactcaggtcgtcataagggctttcactgctggtacggacaagaataccgtctttattaaaatagccgccgatacacatggaatccacgctgaagccggaatcctccggtttgatgacttcatcgataattttgtgcatggcataaaaatcttcttcgccggtgtaaccgcagacatccacaaggattgcgccgcgcttcattgtatgggtatcatataagttcatgaaatttcctcctgatgtattgacgggcatgacacaatcagacgtcatagctattgaacaattcagcacaggcacgttcgcactgccaatgtttggcagcagtacataaggtcctaaaggacaggacctaagtactggccagcactgaagcacctgtgtatgaattgttcaatagctctgactgtttcttgataaagtaaaacgagtcatgcccgatgataggctgtgattaaaaatagttgaagtttaatggttatcatatgataaggattgcgagagtgcaaagcacgtagcaatctggtatcaaaggggtcaaaataccttttgcctccaacatcatatgatacatatcatatcatatgaagcgctgtttttgaggaatttataatggattgctgttatgcttttttcacataatgcccgccaaagcaggcataatgactttcggaaatggacttgaaaatgcgaagaaatatcaatacaatgtaaatgtaattgaacgaaatgcagcgcattttggaagcagagctgtacaattatgacaaagtattttattattttcacgaaaggaagtattatattatggcaaagacaattatcacagcagccttaacaggtgctatcacacctcacggttacgatgttcctgaaacaccggaagaaatcgcaaaaacagcctatgagtgctggaaagcaggtgcagctatcgttcatctgcatatgcgtgatgacaacggcgcaggtgttatggatcctgttaaattctacgaaacaatcaaactgatccgtaagaactacccagactgcgatgttatcatcaactgcacatcttcaggtgataaccgtgtatctgatgattcaccttacggcaacgcagttcgtatgctgcatcatgcaaatgttcctggtatcgaaatgggtacattcgatgcaggtacattcaactgggggatcccgggcggtatcttcagcaactctccaacattcctgacaactcttggtaatctgtatcaggaaagaaatatcaaacctgaattcgaagtattcgatatgggtatgatccgtgccgtaggtgtatactggaagaaaggtatcgtaaaagcacctctgcacttccagctttgccttggtgttgtaggcggtcttgcagctacaccagctgatgttcaggatatgcttgcatacatccagcgtcttcaggcagaaggcaaccttcctaaggaagttacagtttccggtttcggtatcggtaaaggtcatctgccggttatgttctctgcactggctaacggatgccacgtacgtgtaggtatggaagataacgttgtctatggttacgataaagaaggcaagaagatccttgccaacaacctgatgctcgttgaacgtgctgcaagagctgttgaagcttacggcaacgaagttgctacatctgcagaagcacgtgaaatgcttggtcttgcaccactggatcatgaagctgttgttaaagcacttgatgcactgacaattgaagatcttgagaaagcaaaagcagaagcttccgaaaaatatggtacaacatattttgcagctaagagcatgggctaatttgccagatatttttctctaaataaataaaaaacagagtgttttctatgaaattttttataatttttttagaaaacgctctgtttttttatatttgtccgttattttcttgtcaaagaaaggaaaaggggacagaaaaataaacataaaataacaatttatacattaatacccgaagaaatgatgtataataaatgcaaattatgtctaaaatagtttccattatatacatgaaatgtgaaaaaatagacaaaaaaattataaagatattgtatacattaaataaaagtgtagacattcagatataaaagttatataatttagacaaatcaaatggttcacaccttcaggctagcggtcggtgtggagcgaatgtttttaatctgtggtagggttaaggacgacaagtcttatttcattgacacagagtctggcagggatggtagcctgcagaactcaagaaatgcgtaagatggaataagaccatttttatcacctgactggttgaccagttggagtctgatgagagaaaggaagattttatgttactagaaattattcttgctattattcctattgcctggcttattatttctatggctggtctgaagatggccggttacaaatcatgtggtattggtttggttattgcaatcgttgaaggtgttgctgtttatcacatgacagttccggaagcgatcacaggtactttagaaggtgttgtttcagcggtatggccgatttgtgttattatcgttggtgccatgttcctgtataacatgagtttaagaacaggtgcgatggatgtcatcaaagcaatgctggcatctgtatccaatgataaacgtgtagctgctcttgttatcggctggggcttctccaacttcatggaaggtatcgcaggtttcggtacagccgtagctattcctgcagcgatgttagttgcacttggatttaatccggttacagcttgtgttatctgtctgattggtaatgctgcatctcctgagtttggtgccattggtacacctactctgtcagcagcgaatactgcatttcctacaaccattacaggtgcagccgatgcaagtgtgtttgctcagatgctttcagaaccgacagcccgtctgctgattcctctttgtgttgtttctccatttgttatcatccttctttgcggtggtacaaaggcattaaagggtgttgtaggtattacacttgtatctgcattatcatttgttattcctttctatcttgtagccacattcgtaggtcctgagctttgcgtagttatcggttctctggtttgcctcgtttgtacaatcgttatgggtagaaaacacacgaatattccggaagaatatatgcttgagtccaaagaagaagcagcagcttcctctgataagcctcagatgagcatggttaaagcatggcttccttacatcttagttgttattttcctgttaggtacatccaaacttgttcctccgatcaatcagttcctgggacagtttaagtcatcatttgttatttattgcggcgaaggcggtgccaaggttggtttatcatggatcaacacacctggtatcctgatgatcattgcaacgattatcggtacagctgttcagggcgcaagcatcagcgacatgggcgcagagcttggcaagactttcaagggttactggaaagcaatgctgacagttatctttattatctccattgctaaggttatgggttatgcaggtatggttatggatctggcaaatgccctttcatcattattgggcaatgcttatatcgcaatcgctccactgatcggtggtatcggatgcttcgttacaggttccgctacatctgccagcgttatgttcgcaacattacagcagtctgttgcacagcagttaggtatcaacgaaatctggttagtggctgcaaatggcgcaggtgctacagccggtaagatgatttctccacagagtatcgctcttggtgttgcagctatcaaccttcctggttctgatggtaagatcatgagcaagacaatcggatggtgtgtattatatctggttatcctttgtgtattctgtttcgttggcgcataataaggggttattacaaagcgtcgattgaagtacataaggtattaaagtgaaattcataagagaaggtatttaaaagtaataaatcgggcggtctgcatatgcgggccgcctgtttggattgtgcagacagcgtgcaaagccgcaaacatcggtatatttcgacggggattttcaggtttatacggtctattgctttgcaaaagcgcaggcttagattataatagagacagatgaatgtgacagagtaaggaagatggaggtatatggcaatgacaagtttggagaataatggacaggatatggatttgacagaactggaagttatggaaccgaagatgatgatccatgatgaactgaaagtgatctatattaatgaagcacttgaggaagccttgaatgatgaaaattcggatgaaaagaagaaatatgatgccgagaaagcggcacatccggattatgtgacgagacttcgcagactgccggtaaccattgaatttatgaagaaatatgcggcattgaagaaagacagtttcatgcaggatttgattgaacgaaaagagcctgcgctgcgcgcagaaggcgaattatatgaagtgtcttcgttcttcgccttcaagaatatgttccttgcaagatatccggaatgccggaatatctacaaggttgagaaaaagattaaagaatttgaggagcgtcagaggaataaagaatagatgctttgatcttatccgctgactcaggatcctgaataatgccgattaatgtggaggcaaattcgatggctgtacccatgccgcggcttgtaatgacatgaccgtctttggcaacgggatcagtggtgatataggcaccaaagagtttcttttcgaagccagggtagcatgtggcaacacgtccgtttaagatgccgaggctgccgagaatgcttggcgctgcacagatagcagcgagataacggccctgacggctgaactgcataagggcatcgcaaagcggttcacatttgctgaggtttgtggtacccggcatgccgcccggcaaaatcagcatttctacagtattaaaatcaaaatcagcaagcaggcagtctgcctgaactttgatatcgtgggagccggtaacggtcagagagtctgaaatggagactgtctgaatcgggataccggctcttctaaacatgtctacaactgtcaaaccttcgatttcttcgaagccatctgcaaagaaaattgctgtgttcataaaattcttcctttcttggtataaggtaaaattgcatcaatccacagtctttgatggatatgcaaaataaatgatttaacacaggccgctctcgctgccagcccgtgcagtggtacatatttgaagtataccacagttttggtggtttgtggggattttgagtgattatctcatgcagaaaggttggctgggtggaataatgctttactgaaagggtggaaaatgatatactagagcgtataagtgggattctgccttttggcggaattcttcagcacatagtaacagatgggagtgttttcccacctctaagcaaatttcatagtgtttttaagaggttatcgtatgaataagaaggtcaaacttaaaggacggctgaatatgtacatgcgctggccggtactattgagtgcactgctgctggtggcaacagtgctgatgtatctggttgattaccgtgcaggtcttctgatgactgcctgttttgttttatatgtggcagcagccatcgtgatttatttttatttaaagccgtctattgtggatgagttggtgaattttgccatcgaatttgcacaggtccagcataatctgattcatgatcttgagattccttatgccattctggatgagacagggaagcttttatgggcgaactcctgtatgaaagagataatgggggaatttattgatatgaagaatatcagtacattgattccggatatcaagcaggagatgcttccggatgatgaggaagagaagaagtatgcccatattcgctataaagagcgctactacaaggctgagatcatgaaggtgtgcattgatgactttgcgatggagaataaggttgtagagatgcagccggaggcctatcagttatttgcattttatctgttcgatgagacagagatacagatgtccaggaaggagatccagaatcagaagctcatctgcggtattatattggtagataactatgaagaggcattgaacagtacagaggaagtcagacgttcccttctgtcggcactggtagagcgaaagatcaccaagtatatgcagaactatgatgccattgtgaataagatggagaaggacaagtatatgtttgtcatccgtcagaaatatctgccagtgcttcagagttccaagttcgcattgctggatgaagtcagagaaattaatatcggcaatgagatgagtgtaacactgtgtattggtctgggtgttaatgcagccagttatgcgcaggcgctggactgggctcgtcatgccattgatctggctcttggacgaggcggtgaccaggcggttgtcaaggagaaagacaagatttcttattatggcggcaagacgaagcaggtggagaagtctacacgtgtccgtgcgcgtgtcaaagcccatgcgctgcgtcaggtaattgaaggcaaggaacaggtggctattatgggtcataagatcggtgacctggatagttttggtgcggcaatcggtgtctacagagcggcccgaagcctgaacaagaaggcatttatcgtcatcaatgatattaccacatcggtacgtccggtgatcgatcattttatggacaatccggagtatgacagtgatatgtttgttacatcggagacagcaagaggcattgtcaatatgaatacggccatggttgttgttgatgtgaacaccagtgagaggacggaaggaccggaacttttgaacctgacgaagacgatcgttgttatcgatcatcatcgtcagagcggaaattccatcgagaatccggtgctttcttatattgagccgtatgcatcatcagcatgtgagatggttgccgagattttgcagtatattacagattcggtgaagctgcgtccggaagaggcagatgctatgtatgccggattaatgatcgatacgaacaattttatcagtaaaacaggtgtcagaacctttgaagcggctgcttttctcaagaagagcggcgcagatattacccgtgtccgtctgaaactcagagatgatatgcagacctacaaggcaagggcggaagctgtgaagaatgcatctgtagagggtgcgtatgcttatgccgaatgcccgtctgaggggctggagagtccgacagttgttggggcacaggtagccaatgagctgttgaatattaccggtgtggaggcttcctttgtctttacggtggtgaagggtgtgatttatgtcagtgccagatcctatgacagcatgaatgtacagttggttatggagcgtcttgggggcggcggtcacagtacgatggccggaacacagctgaaggatatgacggtggaagaagcggaggctaaagtgaaatccgtcatcaaatcgatgaaaatggaaggagaaatctaaaatgaaagttattttaattgaggatgttaaaactcttggcaaaaagggagatacagtcaatgtcaacgatggttatgcgcgcaattttattttgccgaagaagcttggtattgaagcaacagcaaagaatatcaatgatctgaagcttcagaaagccaatgaagaaaaggtggcaaaagagattcttgaagcagctaaagcttttgcagaggatatcaaggagaaatccgttacagtaacgatcaagacaggcgaaggcggtaagacattcggttctgtttcttcgaaggaaatcgcagcagcttacaagagccagctgaatattgaaattgacaagaaaaaactgcagctggctgaacctgttcgttcactgggtgtgtacaaagtcccttacaaagtccatccgaaggtaacagcagagcttacagtaaaagtagccgaagcataagaggcacagaacatggatgaggcgattataaagaagattatgccccatagcatcgattcggagaaagcggttatcggttccatgatcatggatgcggatgcgattgttgcggcatctgagatgcttacaggagatgatttttatcagcggcaattcggcatcctttttgagaccatggtagaactttacaatgaaggaaagcctgtagatgttctgacgcttcaggaacgcctgaagatgaaagacgtccctgaggaatttgccagtattgaatatatcagtgagctggttgatagtgtaccgatatcgacgaacatcaggcagtacgcgcagacagtggctgatgatgcgatgctgcgcagactgatccgtgttaatgaagagattgccaatgcctgctatcagcacaaggagtctgttgaagagatcatgaatacgacggagaaacgtatttttgatgtgatccagaagaagagtacagatgaatatgtgccgattcaggacgttgttttgtcggtaatagataagatagaggcggcggcccgccataaaggaactgtaacagggctggcaacaggtttttatgatctggattacaagacatcaggccttcagccctcagatctgattcttattgctgccagaccatctatgggaaagacggcctttgttctgaatctggcccagtatatgtgtgtgcgcaatcatgtgccgacagcaattttcagcttggaaatgtcgaaggatcagctggtcaatcgtattctctccatggaatccaaagtggattcccagtccatgcgaacgggaacacttcagccggctgattgggagaagttaatagaaagcgcaggtgtgatcagtacagcaccgctgattattgatgatacaccgggtatatcgatcacagagctgcgttcgaagtgccgtaagtataagcttgagaatgatctgggcctggtcattattgactacctgcagctgatgaccggcggcagcaagaaacaggagtccaggcagcaggagatttcagagatttcccgttctctgaaagcattggcccgtgagatcaatgcaccggtgattgccctttcgcagctcagccgtgcatgtgagacgagaccggatcatcgcccgatgttgtcggatcttcgagagtctggtgccatcgagcaggatgcggacgtggttatgtttctttatcgtgatgattattacaacaaagacacggacaagaagaatatttcggaagttattattgccaaacagcgtaatggcccgatcggtacagtagagcttgtatggctgccgaattatacaaagtttgccaataaagagaaatagcgaaacttgaaattatcgcaaatcacaaccggatgtgacagcgagagaccttttatttattcagcggaatagataaagggtcttttttgttggaagcaaacgaaggattggcaggggaaaaatttgcttaatacaggaactttgttataatggaatcaacaggcaagccaactgcgatttctacaccagataagaagacaagatgagaggaaattgatggaggtagccaatggcagaaacgagatatattatatcggatgcggccagaatgatcaatgttgagccccatgtcctgagatactgggaggaagaactggccattgagattccgagaaatgaacttggacacagatattacacagagaaggaaatacatctttttgaaaacatccgcgatttgaaggagaaaggctttcagctgaaggctattcgtctgatcattacaaccttgaatgaagatgcgccgtttggaaagaaggagaatgctgaggacaatatgacagaagatgagcttgcggcagtttcaccggcggcttcgcgggaacaggatgatagagagcatcataagcctgagaatcagatttcagacaatgagacaaccggcggaaatgaggaacaggagataaaggaaaaagaggacaagccggtgcctgtagaggcgaagccgtataaggttctgtcggcagaggataaaatgaagcattttaagaccattatggacggaattgtaacggaagctttgcagagaaacaatgtacagcttgaaaatacaatgatttcccaggtgacggatgtggttatacaggagcttggaaaggttgaggaaagacaggaaggacagtcggaacgctattataaactgctggatgaggcgattcgcggcaaacagagagcaggccgggaagtggcagctgcaaaggtgccgtcctatggtgtgccaaaacgacggaaacggttattcaaaagaaaattcagatattaaaaaaggtccggacatacatagagctgcagcgttgctggttgaatagccactgcagctctatgtatacctggaacctaataaagatgtgcaggattagttgtttgttgcaagaaattcgttgatcttgtcaactaattcctgaggattaatgccatgaacaaatgctgcttcttcaattgtctcaccctgagaagaaggacagccaaggcagtgcatgccaatacctaaaagaataggtgctacattggcatcaatgcggagaagatctccgattaaagtatcttttgtaactacagctgctgccataatatcactcctttcgtattgtgcgaaaaacgcatcttctcacattataatatactttaaattattttgcaacaagacatcatttgaaaaattttgaggccattggtaaatgtgaaaattttctcatttaccaatgaattttcttgatttatacaagattacacttgtattcaatgccaatttgttatagaatagagtcgtacgaaaattaatatttatcattattaggaggtatacgattatggcatacgtaatttctgatgcttgtgtttcttgtggtacatgtgcaggtgaatgtcctgttggcgctatcagcgaaggtgatggcaaatacgttatcgatgctaatgcatgcttagattgcggttcttgtgcaggcgcttgccctacagaagctatttctcaggaataatcctgttggccggtatatccggtttattatgaaacatgaagaaaaggttactatagcaatatagtaaccttttttgttaggtttatacatatgaaattcagaatctgatctaagcatacacttcttataagcttcgaagaatctgcagtgcgttttcacgaatgattgtctcataatgttcatcaaaataatataaggtattggcactggccttctgtatggaaccgaattctgaagccaggcggcagatgctgccgaaaacagtgcgtgatacgccttcgctggagagtacaagataataatgaccgttgttcggattcttgtacagggtattgccgcatttgaaatctgccggaaactgttcacttaggcaggacacttcattcaatgtcctgaattcgtaaatccgcaaaatggtcttctgaggctcttcatcctcagaggaagcatcgccgctggttgtctctgtatcggatgggagatcggcggttccggaaatactgtgtaattcagcggtcttggacagaatatcgctgcccaggcgcttaaagatgtcaagaatatcgtctgcgctgctgtagatctcatcatcggtgtctgacagatcttcagtatcctcgggagaaggtgtgaacttggaaaaacgtgtatccagctcctccggatcctccaccttggtgacgatcaacataatacattcattggaaacaggaacagcttctatgatcaaaggaatattatctgcttcaaaaccgagttcatcagatgcctgaaccatcatctcgcgaaaaagggccttagccttctctgtgccgtaggccagctcacttatcttcaattcacgttctgccagatcactgcgggtcagtgtgcagcgaatctgattctcactgatgcgttctaacttcatgttctcactcctttccatgcaaaaacaggacaaatcacttccttttctgcaagtatcttcattatagcgattatttaataggctgtaaaggggaaaacgcatgggattttggttgcagagcggatgggtgtcgaggcattatgtcaggtgtcgaagatcaatggaagctgtcatttgaagatggttgatgccggggtgagcggctgttatcattattatatgtctgatgaacagtatcattacatgggaatatgcgggtgcagaatataacatatcacaggcagcacagcataaaaatggagaaccgaggacatttttacggatttcaaccatgaaaagtggaggaagaagagaaaatgagcccattttttcagaaaaaatggaagaaaataccggttttagtgttttttacaggcagaaatgttgatggattgacggctatgtagtataatcataagataagtatatgaataggagactgtttatatggaagtaataacggatgagatcgcagagcgtgggctccgacggaaggcgttagcactctggatactgtcaggtgcgctggttgcagtgaccatcggcagtatattgttctacaggaatccgtggcttgtacatcgtatggacgcttcccaggcgacgacagaagtactaggacagattgccgacagcagatccccttatatcaagattgaagggatggaactgacgtttaccggctactataaagtcaatggaagtggaacagtatgttcatactgctatatgggttcagtgggtgattattatatattgacagatataccggccagagataaaggggctttggttgaggacagttcactggacgcgaatacgctgagcgattatacattaacaggacaggttgtcaggaagaacgagattacagaacagctggccgaggccgagaacatgacacttgaagattacaggaactattaccatatggctgatgtggagatccatgattatgatggtgatcaggaacgtcttcgtatctatcagctgatgctgcttgtattggcagttggggctgttgcagcaggtgcgattctctggtctgaatccagactgggaacgcagatcgtgtcagaaaatttgtgatggcggtcagtaggcaaaggaggaaccaatgaagagagtattgccgattataatcgttattttgctgattataggcgtaggaggcggagtagtctggagtattctggcaggccggtataagccgacagaagaggtgatagattatgctgcggagatgggattatctgagaatgaatatgccatcacgttgaatcaggaagtattgaaggaagacagggctgttgccattgacggcagagtttatctgagtatggatctggtcacagaaaccatcaacagtcgtttttattgggatgacaatgagaagctgctgttgtttacaacgccgacagaagtgatgatgataaccccggatcagcaggaatatactgtgaagacatggaatggcagcagtgatgcggatgagggttacatgatcgtgcgtacttacaatgacagctgctatgtggctgcagattatgtgaaggcacatacgcagatggattatgccgagtatactgagccgaaccgtgttgtgatggctacaaagtgggcagaacaacagattgtaacactgaagaaggatacagcagtccgctataagggcggtgtcaagagtgaagtactcagacaggcaaccaagggagagaagatggtgcttcttgaagcctatgatgattggagcaatgtagctacagaggatggttatgtcggttgggtatccaataagacactgtatgacgcagagactgagacgcccgaggcgccggcatttgatgaaccggagtataccagcatccacaaggattataagatcaatatgggctggcatcaggtgatgagtgcagccgccaacagcaatttatcaagtgttctgacttctgcgccggggattaatacgctggcaccaacctggttttcattttctgatacaaatggcggtgtgacatccattgccacacaggattatgtggatacatgccatgcgaacaatattgaagtatgggcattgttttccaatgaatttccgggtgatgacggaacgatctacttcgattcatctaagacagatgaggttttgggatatacatctaagagggaacaggttatccgcaatgtcattggttatgtgaatcagtatggtattgatggtatcaatattgattttgagctgatttcacaggaaggtgcagatgactatattgagtttatcagagaattgtcgattgcctgccgtgccaacaacattattttgtccattgacaattacgtacctgagtacacctattattataatcgcagggagcagggaattgttgcagactatgttgttattatgggatatgatgagacgctgccaagttctgaaacaccggggcctgtcgcatcactgaattttgtccgaaaggggattacagatacattgaatgtcgtggataagtccaagatcatcaatggtatcccgttctattccagagtgtggtgtacaaccccggacggcacagtcagtgcctttgcctgtggtatgtcagaagcgctgagctatctgacggatcatggtgtgacgccgcagttccttgaagatatcggtttgaattatggcagttatacttcggataaggatggcaacttctatgagatctggttgcaggatgcaacggccgttgaagaagagatgaaactcatcagagagtttgaccttgcaggggttgctgagtggaagattggttttgagagcggaacggatatttggaatacgatcagttcttatcttcagtagacggttttgaaccatttccgggagtacatgaagctgtattagacaaaggataaaacaaatcctgtttgcatatattgtcttgaaagggatgatagatgcgggcaggattttttgtgtggaaaaaaggaattagcggacttctgtggggacttgcgattgtgatggtttacagtgcactatttggacggacaatatccggctatgaaacgggggtgaataaaactgtgtccgttatggccggagaagaagcgcattttattgttattgacagtggacacgggtttttcgatgcgggtaaaatcggtgtcagcggtgcattggaaaaggatattaatctggccatcgcgttgaaactgaaagcggatcttgaggcgcagggattttatgtgcgtatgacgagggagaatgacgtacagctctatgatggcatgcggccgtcagataaaaaggaggatatgcagaaaagagtatcccttatgacggatgaaaactgtatactggctgtcagcatccatcagaacagctttacagaagaaaaatacaggggtgcccaggtcttttattatggaccgtcagaacgcagcagagggcttgcagcgtctatccagcaggcattgatagaattccaggatccggataatacaagacaggagaaagccaatgaggattattatttgttgagaaaggaaactgtgccaacggttatctgtgaatgtggttttatgagtaatgcagctgaagaggcgcttttgaagtcggagatgtatcaggagaaaacagcctgggcgatttcagtgggaattgtgcgttacctgaacggaagcacagagaagggtgatattgagcatgacaggtaaaaaagcaaaaaaattggcagcctttcggctgcctgtaaggggaaggtatatatttaaaaaagggattaagaaattgtcttttgctatgtttgtatcttatcataggtgatgtctataagtgttaccaaagattaaaaaattattcatataattttgcacaaaatgacgatgtgtttcttgtgcaatgtcacgattgacatatgatgatacatattttgggcgttgattggacaaaatgctgataaaaatataatagaaagcagaaaggtgataagatgatgaaaaatgtaagacgaattgcaaaatggctgatggcatgtatgatgacagtttttcttgcaggtgttgtttctgcagcagaaacaacggaaaaaggagagatttcctcctttaataactatggtgagaatggtgtttatgaagcgataggagaatatgaagtggcttacggctctgttgttgcggatgtgacacgcaaattgccgtcaacgctgacggctaaattgacaacaggcgaggaagtggaagtgccggtgacgtgggtgtgcgtcagtgacaatctgggtggcaatacttatgtaccaaaacattcagatgtatctgcagtctatacttttgaggcccagctgggtgatgggtataagatagcaggaaatcttccggaagattatgtgatgccttttgtcactgtcagttatacacaggatgcgcaggaactgaacagtcaggcgccggagatggatactgaaataaatgcggctgtggatactgcttccggaatgtctgtatggtcatggatcatatggattattgtgattgtgatcattgtagttgttttatggtggttatttgcaggaagcaagaataataaagaaaaataacatgcagtcataaaaatgaaaacaggatgcagatgagaagtttaatgcaggttgcttccatttgaatcctgtttttagattttacagtaactgttcagggctattatctatatgagcagcgtattaatgcctatgttgacataagaacctgcggccgcctttagctctcccatgggcggatgcggtatgtgacgccgagactgtcacagatggctttacactgggcttcttcttctttggtcagtgttgtatcgacagtggtcatcacaacattcggtacatagtgtgtacattccttggcgaagtcgagcattgcctggaaagactgatcaccgaaacggctacggaccagttcgtggtaacggtcggcattcggtgtgttcagactgatggaaatggtgtcaatcagtcctttgaaatccggtgcaatgtcgcggccattgacaagattgccgagaccgttggtattgatacggatcggtttgtggtaagtttctttaaaatagcgggcaactttcagaagcacatcgatacgttctgtcggttcgccaaaaccgcagaagacgagttcgtcaaaagaagccacgtcaaagttggcgaaatcggcgataatctcatcatattccggttcacgggtaagccacagggaatcggattctcccacatgatccattgtctgtctcagacagaaagtacaggaacatggacatttattcgtaagattgacataaagattgttgtgtactttataaagaatagtcatatttaatactcctttgcaattttctgattcaaattgtcagttagttatatttcaatgtatgcagtacttcttcaaaacatacaccatctgtcagtggaatgtcaagttcaatggagcgctggatacactttttgatgaagttggatgcctttttaaccgagtggtcgaaaggaacgctattaacggcatcggcagcaatgatcgctgtaaagatgtcgccggtacctgagcgggatgtaccaatcctgtgggttctgagtactctggatggcttgccggcttcgtagcagaaattggccacgtactggccctgtgtgatgccggtgataacaatcttggatgggccgttttcggagagtctggcagccatggcttcgatctcggaaaggtgccacttcttatcttcataaggggtatctgtcaggatgcaggcctcggtcatatttggggtcaggatatcggcataacagacaagatccttcatatgatcgcacatttcctttgtgtaggtcggatatggtttgccgtagtcgcccataaccggatcgatgatgaccagattgtccggccgcttaaaatcacggataaagtcggatacgatggcaatctgtctggcggatccgaggaaaccggtgcagataccggagaattcaaggccaagcttcttccattcgttgatgctgggctgcatatgatcagtgtaatcctggtagtaaaagctttcaaaaccggtgtgatttgaaaaaatagctgtcggaagggcacagcactgaacacgaagcatggaaatgacaggaagcgccactgcgatcgagcagcggccgaatcctgtcatgtcgttgattaatgcaattttcttctggtgattatgataatctgacatattcagttcctttcttgaaacaaatacatgcgactaacgctgagtgagccgctgaatatactttggcagatgtgcagcctgcagagcggaaccgatgacatagaagagaacgatgccgacaatgccttccataacaaggcccggaatctgagtcgcaccggtatagatgctgccgtaaagaatggagccgccgatgaaatagccgacaaccatgataatgataccgacaatgctggcagcggctgtacgaatcttgaacatgttgacagtgaggcctgtgcggttggcaatataaccgatgacaaagcccatgatgcctttgatgatcagtgttgggatgatccactgtgcgtaaccggtcagtaagtcagacaatgcggaaccgataccgccggcaagaagacctgttacagggccaaaaaagacaccggagatcagaataaaacaattgccgagatgggcatatcccagtggaatagggaactgtaaaaacattgtagaaagacacacgagagcaatggcaagtgcattgatgctgattgttctggaatttaacttattcataagtaaaacctcttttctgtattaacattacttgatatcatactgtgaatgtgacatttttgaaatggccagtttcatattatttcatatggtcagttgatggcaaagcaagatcgggaggcagagtggccagaaaaggatatatatggtatactggataaaacaatagcagtacgcgcggtcggcgcgtcaggcacataggagacaggggtgacattttgaattttatacatacagcagacattcacttaggtgcagcaccggacagtacaatgacctgggcgactgacagaggaacagagatatgggattctttttacaaactgcttgatgaaacagagagatccggtgccgatcttttattgatcgcaggggacctttttcacaggcagccgttgaagcgtgagctgaaggagctgaattatcgattttcgcagctgacgcatgccaaggttgttattgtggcgggcaatcatgattatatcggcagtcagtcattttataaggattttgaatgggcagataatgttgtatttttcaggaagaatcacatatcttatgtttatattcagtcactgaatctgattgtatatggaatgagttatgacagacaggagatcacggaggctatgtatgacagcctcaaaccgatgcgaagatttcgtgacggcaggccgctgcctgatggatgcaggcatattttgctggctcatggcggggacagcagtcacattccgatcaatcaggagaagctgcgccaggcgggatttgactatattgcgttgggacatattcacaaaccgtggattgatgatcggagtccgatggcttatgccggtgcactggaaccgatcgaccgcaatgatgaagggcctcatggctatattcgcggtgttctcaatgaaagtgagacaaagatcgattttgttccttttgcgtccaggtcttatatcacattaaatgtacctgtcgcaccggagatgaccatgcgtcagctggctgagcaggtgaaagcgctgatggggcagaacggaagacaaaacatgtttcagatagcaataagtggtttcagagatgtggattttgagctggatgagcggatgctgatgcgcctgggaagggtgctggcagttcatgatcactctgttccggattatgattttcagcggatttatgatgagaataaggataatatcattggcatgtatatccggcacatttcggaaatggagatcagtgacgatttgaaggcgaaggcgctgtgttatggtatgaaagcgttttatcagacgaagtaggaggcagggcattgattataaaacaattgaatctggaccattttggcaaatttcacggcagggagattgatctgaatcccggagtgaatattatttatggggccaatgaatcgggaaagtctacagtgcatgcgtttattcagagtatgctgtttggtgcggaacgccttcgtgggcgcggtgccggacgggatgcatattccaaatatcagccgtgggaaggcggagcaagctatgaaggacggatgcgcctgagttatcaggataaaaattggcggattgtcaggaatttctataaagatgacagtcattttgaggtggtcgatgagacgagcgggcggcaggaagcatgcgcatcagatgatatttcatcactgataccgggaatgcagctttctaattatcggaattcaatcagcaccggtcagctgtcggtccagccggatgggcagtttacgaccaatatgcagtcttatatggcgaatatggctatgggagctacggacagtgtggatgtgggacgggccctggcttatctgaaggatgaacgcaaaaaggcagccggaagattttctcaggagacttatcaccaataccgtgacaaagcagaaatgcttcgaaatgaattgaaagccagagaaggcattgcagagcagcagaaagctcttgaacagaaccgtgaaagcattttaaagcagatacagcaactggaaaatgatgcagatggcgctatgaaagcagatcggcaggaacgaatgaaagcgatacagctgatccaggagaataatgatgtggcggccatgtacaaagccaaaaaagcagaactcagagaatttgagggacagacaggcgggcagaagtatcagcagcagatgagtggtgtcgtggaagaatatgaggctcgacaggagaagctggaggattatcagtcgagatacagtgaactggaggaacagaatgaaggaagcagcattcgcaatctggcattgatattccctgtggctgcacttgctgtgatcgtctggattgccggcggtcttgtgggactgaaaggcattacacatattcttgccgctgttttgctgacagctctggcggtaggactggcagtatttctgattcggtcatccggcggcagaaaaggcagaatgaagcagctgaaagccgatatggatcgtctggagaatgagcagcaggcaattttggataaatatcagattgaggatatccatgaactcatggaaaagagccagaatcagagaagccgtcaggatgtggtactcagacttcggagagaacttgagcagctgcgtaaacggtatgatgagctgcagaaacctttggcaccgtatcttgagaaatatggggatagtgtaactttggaatcggctgcgggacaggagcagaaacagaagcttcaaaagcttcggggtcaggcgtcggagctgttgagacaatcggaacagctgaactggcagctggagcagctgaatatgaaacagtctgagctgagtgagctggaagaacagctgaaggtgcttgatgcagaccggaagatgagtgaggaagatatgcaggccattgacatcagcatgaatgcgattacggaaatgacggccagaatccatggatcttttggtcttcagctggcagattatatttcacagcttttttcttatatttcaaacggcgcacataagaaactgaacattgatgagaagtttcaggtgacggtggatgatgacagaaaactgctgcagccgcagcaactctctgcgggaacggcggatcagatttatttttctgtgagaatggctgtcagtcagatgctgtatgatgaaccgatgccgctgatattggatgacagcttcgttttgtatgatgatgaacgtctgaaaaatacactcagatggctgacagaacagaaagctttcagccagatcctgatatttacatgccatcacagagaggctgagatgttggagagtttaaattgcgattatcattatgttgaattgtaaagggggcatatcaaattcaccgctctctttgctgttatcattatgagttttgcagtataaacgatagtcgcaatttaaatgttgtgagacagataagacaaaagaaaaacggattccggtatgcttcaaatgatagatttggagataacggaatccgttttgttatatcattgcctgtggtgtacaggttttatttgtggtatttgcggtagtaagcaagtgagttctggattttcgcattaggatcgagcagttcgctgatggaatgatcatagttcagtttgtcgatcatgagtgcgatgtacttgctcaggtctacattgatgtagtatggacgggataataaatcaggtgtctgataaataacgttggttgtcagaaccttggagataagaccctgttcataatattcatcgaactgtttcagaccgtttgtgaaaagaccgaatgttgctgcaacaaaaacacgctttgccttacgtttcttcagttctttggcaacatccagcatgctttcgccagaggagatcatatcatcaacgatgaagacatccttgccttcgacggatgaaccgaggaattcatgagcaacgatcgggttgcggccattaacaactctggagtagtctcttctcttatagaacatacccatatcgagaccgagaacgttggaatagtaaacggcacggcccatagcgccttcatccgggctgatgatcatcatatggtcgctgtctacctgaaggtcagggacgttgttgaataagcttttgataaactgataagttggctgaatgctgtcaaaaccactgttaggaatagcattctgaacacgtggatcatgagcatcaaaagtaataatattttcaacaccgagagcatgaagttcctgcagtgcaacggcacaatccagtgattcacgggatgtacgcttgtgctgacggctctcataaaggaatggcataataacattgatacgacgggccttacctgctgctgctgtgataatacgttttaaatcggaataatgatcatccggtgacatcttgttcatgtgaccgcagagagaatattcaattgaataattggtgacatcaacaagcagatataaatctttgcctcggatagaatcaaggattgtgccttttgcttcgccggaaccgaaacgggagcacttggtattcacaatataggaatccttaaccctatcatcctgatgaagaacactttcacgttcttttctccagtcaacgatatattcattgaccatattgccaagttcactgcagctctgaagcggaataatacctaaatcgcctactggaattgagtttctaaactcttcaatgttctgagccataatatacctccatcatatgttaactaaatcaaacaaatgacgacattgtcgtccactttatttataacgtatccgacataggatgtcaaggtgtcttactcggaaattgcctttttaatgcggatatcgtcgccgaggatcagcatgatctcataattgctgactaatctggaaaatattcgttcactgtattcgttctgcagttcatccagggacagattcgttgaaataatggtggattttcttgccagcagccgttcgttgatgcaaagaaaaagctgtgaagtaatgaaagcattattcaattctgtaccaagatcatcaatgatgagaagatcgcagtcgagaatataatgaaacatattctcatcagtgtcatccatatcatcattcccaaatgtgttgttctgaagaatgtccacaagatgaaaagcggtcagataaatcacggtatgagaggcatccagcaattctctggcaatgcaatttgtcagaaaagtcttgcccacgccggtgtcaccgtaaaagagaagattccgggactgttcatcgaaatgatcaatgaaatcgtgacaggtactgagaacggcctggatattctctcggggactgacgccgaggctgcggttcttcgtatcggaataataccggatgtcaaaggtatcgaaattctcgcgtttcagcacatcatggatgttggattggcgatagagaagatcgaccatggcctgcttaaaacagtgacatttcttgtcaccgataaaaccggtatcatgacaatccgggcatgaataggtcagctccagataatcagcaggatacccggcctgtgtcagcagaagcgttttctgctcctgcagttcctgcagatgctgctgcatatcctgcagaacatccttccggcccagggcagcagcccgggctctgtctgcacagaaagaggcggtttcttcttccagctgccggtaggcaggcagacgatcgcagatctcctgataacgctggctctgaaggtgtcggtgctgcagctggcggagatcatattggcgcataattgcctgatattgagaattcttcaagttcataatgacatctccttttcagtcgaactacttgttggtggaaccattctgaatcttcgcggccagtttcttctcaagagcagcgtagtcataactgcgctgattgaaattgtgaaacttattggaagacggtcttgcctgtttgacggccgggcgcttagccggtgcagctgccttctcggcacttcgagccttgtcagcggcgagtacctctgtcatagtataggcaccgagagacttccagttgctcagaatcttgtctgtatattcaaaactcggcgtatggacagccatcatggtgcgtcggcaggcttcaaggatgagctcgaggctgaaaccgtaggtgcgggtccacttgttgataaattctgcttctccggcagctggcatacgtccgccgagaccaaaggctttcagtacagcgaagcaggctttctggtgagtttcgctctgggtgcgggcttcatcggcagtggtgatatggagatcggcccaggataaagccactttctcgatataacgcatatgggtatgcccattggagacacagtattcaaaaaggtattcaatgagatctctggaaaagccgagatcatcataaaaataataaatcgtgctcaaatcggatgcactcagaggacggccgagatattgctgaatgatgaagatcagctgtgtgccgtcatctgattccgaaaagcggtgcagttcctgtgtggaacgaggatgcattgaaacggccggggttgtgccgaccggagtgccggtgataccggtacctgtctgcgcagcaactgcagattgtgccggcgcgggccggcgctgctcagggggagcagtcggagtatccttctgactgctgattgaagtgacagcgttcaggcagatgcctgcaattgtaccgtcacggtcaaaggtcagtcggagtagcccttcggcttcccagtatttcagtgcacgggtcacgtcgttttcagtcataaaaaatatatcggcgatgccgctcagagagagggcatgatccgaatgagaaagccagcggagcagataaagataaatcttcagaaattctccgttggctctcggcagatattcatcaaaaaaggtattcgggatgacagtcacgccatcagaataaccagcagataaggtaataggtttcggcataaagccacctccagattcaattccggtaacgatcaggtgatgatacagttacggattttttcttaagtataacataaagctgaaaatttgagaataccgggggttttgtgaataaatgtggatattttggtggagaaagttgtggataatgtggataactggtggacgggaaaggtgaataaaatttttgaaatgtcgaaaaagcccataaaaagcggagtttagacgaaaaaagaaaggcggttgcgtagaaattatgtaaacaaaaatatccaccggatttatccaaaatttttgttgataaatcggtggatattgtggataactttacttaatcagcgcttcgcctactaaaacaacgtctccggcacccatagttatcaacaggtcgccgttgatacatttttcacgtaaaaatttttcaatctcctcaaatgaaggaaaatagtaggcttctttgcctttttcaaggagcagcttctggatatcccttgaatggatgtcacccgggtcggtttcacgggcagcatagatatcagccaggacaatcttgtcagccagtgaaagtgcatcggcaaattcgtggaaaaaggctttggtacgtgtataagtatgtggctggaagacgcaccagatctgacggtgcgggtatttctgtgccgcagtcagggtcgctttgatctctgtcggatgatgcgcataatcatcaatgacggtcacaccgttaaactggcctttgtattcaaagcgtcggtcagtgccttcaaaagccataaggcctttcttgatgatatccataggaatatgtaattcgcgtgcggaggcgatagctgccaacgcattggatacattatggatacctgccacattcagctggatatggtcaatcttcttgccgtaagcgatcaggtcaaaactgcctttggcaaattcgtcaaatgtaatattctcagcagcataatcacactccggtttcagaccgtaggtaatgatatgacatggcagaccgtctgtaatctcagatacattgctgatctcaccattgataacaagaatgtcgtctgcgtcaagcttctctgcaaacttgcggaaagaatgacggatgtcgttgatatccttgaagaaatcaagatgatcctcttcgatattcaggatgatttcaaggctcggattgaacttcagaaagctgttggtgtattcgcaggcttctgtaataaagttgtcagagtgacctacgcggatgttgccgtgaatggcttttaagataccgcccacgctgatggtaggatcagtgtctgctgcaagcagaatatgagacagcatggaagttgtcgttgtcttgccgtgggtaccggaaacggcgatggcattggtatagttggtcatgatctgaccaaggagttccgcacggtccatcatcgggagacccgcagatttggcagcggcaaattcagggttatctggatgaatggcagctgtatagacaaccacatcgatatcaggtgtaatgttttctgcgcgctggccataggcaatctggatgccaagagacgtcagatggtctgtgatggcagattcgtgagcgtcggaaccgacaacagtaaagcctttggcgtggagaatttcggccaggccgctcatgctgatgccgccaatgcccataaagtggatctttaccggtttattaaaattgatttgatacatcagaatccttcctattctataaaatttaataagtgtataacttttgtgactgtgcatatcctgcacggaacagttacctattgctattataaccgcatttaatgaaaaatcaaatgaaaattatgaaaatgtaaattatgtattgtatacaaaaaaactatgtaaaaattgttgaaaattgtcagaaaaaagttgcataaaacctactgatactataaggattgcatacattttgtttttttgtcgtaaaaaaattagtaaatactgttcactttttatataaatagtgatataatgagttcacaaataacaacagaggtgatagcgtgattaagaaagaaatgatagccatgcttctggccggcgggcagggcagcagacttggtgttttgacttcgaatgtggcaaaaccggcagtggcttttggcggtaagtaccgtattattgattttccgttgagcaactgtatcaattcgggagtggatacagttggtgttctgacacaatatagacatttgcggctgaacagccatatcggcattggtattccgtgggatctggaccgtaatcacggcggtgtgacattgcttccaccttatgagaagagcgagagttcagactggtatacaggaacagccaatgctatttatcagaatatggaatatattgagaagtacaatccggagtatgtactgatccttggtggtgaccatatttataagatggattatgaagtgatgctggattaccataaagcaaaaggggcagatgtgacaattgcctgcatgcctgtaccttgggctgaggccagccgttttggcgttgttattgccgatgacaacggcaatatcaaggattttgaggagaaaccgccgaagccgagcagtaaccttgcgtctatgggtatttatatctttaactggccgatactgagagaggcgttgatcgctttgaaggatcagccgggatgtgatttcggtatgcatgttattccttatgtacataatagtacgcataattgttatgcgtatgaattcaatggctactggaaggatgttggaacactgggatcctactggcaggctaacatggaattgatcgatatcattccggaatttaatctgtatgaggaattctggaagatttatacgaataacgatatgatcaagccacagtatttcggtgagaaggctgttgttgacaggtgtatcatcggagaaggtgcggagatttatggagaagtgaagaacagcgtcatcggcgcaggcgttatcatcgaagaaggtgctgttgttcgtgattctattgttatgcagggagcggtgatcggcgctggaacaacggttgataagggaattattgccgagtctgtacaggtcggcagggactgcagactgggtgtgggtgaatttgccccgaatgtttacaatccaaaggtttatgcgtttgatcttgtgacaatcgcggagaattctgtgattccggatcatgtacagattggcaagaatacagcgattgtcggaaagactgtaccggaagattatccggatggcctgctggcgagtggacaggttattataaaggcaggtgaaatataatgagagcgattggtattgttttagcaggcgggaacagcagcagaatgggtatactggcgaataagagagccgttgcagctatgccgatagcaggcagctacagaagcatagattttgcactgagcaatatgtcgaactctcatgtacagaaagtcgctgtatgtacacagtttaatgcacgttcattgaatcagcatctcaattcttccaagtggtgggatttcggacgtaagcagggcggactttttgtattgacaccgacgatgacaacggagaacaattcctggtacagaggaacagcggatgccatgtatcagaatattgattttctgcgtgaaagtcacgaaccgtatgtgattattacatccggggactgtgtttacaagactgattttaataagatgctggaatatcatatcaatcagaaggcagatattacagtagggtatacgaagctggcggcaggtcaggatgatccgacacgttttggcgtgatgcagatggatactgacggacgtgtgcttggctttgaagaaaaaccggttgttacagataatatgactgtatcaacaggtatctatattatcagaagaaggttgctcattggacttttggagaaggccaatgccgaacaaagatatgactttgtcaaagatattcttgtcagatatcgtgagacaaagaagatttatggttatgaaatgccggggtattggaataatattgcaactgtagattcctattacagaacgaatatggattttctgaagaaggatgtcagagattatttctttggcggttatgcgggcatttattcgaaggttgaggatcagccgccggcaaagttcaatccgggggcgtctgtgagaaacagtctggtggccagcggatgcattattaatggcaaggttgagaattcggttctgttccgcaaggtatatgtggggaataactgtgtgatcaggaattcgattattcttaatgatgtctatattggagataatacgacgattgagaactgtattgttgaaagtcgtggaacaattcgcgcgaacgaaacttacaggggtgaggacggcaaggtaagaattgttgtcgaagaaaacgaaagatatataatctgataagtggaaactgcagctgtcatgaatgaacagttgtggaagtatcagaataatgggggtatacatatgcagattacagatgtaagagttcgcaaggtgacgaaagaaggtaagatgaaagcggttgtttcaattaccattgataatgaatttgttgttcatgatatcaaggttatagatggggagaaaggcctgtttatcgcaatgccaagccgtaaggcagcagacggcgagtacagggatatcgcacatccaattaattccaatacccgtgaacggattcagagagagatccttgagaaatacaaggaagctgcactggaaacagaacaggaataacagatggaaacctgagctgttatgcgttgtgcgaatctgcacagaatgattgcaaaaaataggaaataattccgggaagggatgccgacagtgagaaggcatcccttcttttcaccgtattgacaaagaaatataaaacttttatattataacagataggaaactcagagatattagcagtgtatacggagcgaaagatatgcatttaatcgtaggtttgggcaatccaacaaaacaatatgaaggaaccagacacaacgtcgggtttgagacaattgacagaattgcagcggagaatcagatccgcgtggaagagaagaaacacaaggcactttatggcagcggttatatagagggcgagaaagttattctggcaaagccgcagacatttatgaatctcagcggtgaaagtgtcagagaactgtctgattactataagattcctgcagagaatattattgtgatctatgatgatatcagtctggatgtgggacagctgagaatccgtgagaagggcagcgccggtggacataatgggattaagaatattattctgcatcttggaacagaggtattcccgagaatcaaggtaggtgtcggggagaaaccgaagggctgggatctggcggattatgttctgggacgttatagtgccgaggatagaaagatcattgacgaggcacagaaggaagctgctgaagcggtcaaaatgatggttatggatgatgtcaggggggccatgaaccggtataataccaagaaaaaggcctgatagcagatgcgtgaaaggagtttggcatgaaagcgtttacacagccattacatgatttaagtgaatatgatcagatcgtcagtgatcttgccggacagcggacaccaattcatatagatggctgtatagattcacagaaatgccatctcatcagcagtatcggagaaccttatccgtttaagctgatcgtcacttataatgagattaaagcaaaagaaatttatgaggattaccggttttttgaccggaatgtttattattatccggccaaagacattattttttataatgcagacattcacagcaatctgatcgtcagtcagaggatggccgtgatccggcgaatgatggatggatgcccggttacagtggtgacaactattgatggtctgtcagacagactgctgccgttggaagaacttcagaagaaccgatgtgtttttaaggtgggagatattctgccgctggaagcactcagcaggaaattgacggcgcttgggtttgaaagagtcagtcaggtggaaggtccgggccagtttgcggtccgcggtggaattcttgacatttataatctggcggatgagtgcccttatcgtgtcgaattatggggagatgaaatcgattccatcagaagttttgatgtagagagtcagcggtctattgaacaggttgatgaggtgacaattgatccggctgccgagtatattatgagtgtatcggtacgggaccgtggattgaagctgatcgatcgggacatgaagcagcaggtgcagagattgaaggatgccgggaattatgaagcggcggacagattgaaacaggcagttgcggaattgaaggacaatctggaattgagcagcgcaacttcaggtatcgatagtcttgtgcagtatttttatgaccatacagtttcatttttggattatttcacggaaaaggatagtctgatcatcctggatgagccggcccgtgtggcagagaagggggaggctgtaacggcagaatacagagagagtatgatgggcaggctggaaaagggctatgtgctgccgggacagacagaggccatttatgaatgtcggaagattctggcacggatgggaagtctgcggacggttttgctcagtacgctttcctataattcagcgcatattgcagttaagagtaaatacagtatgatggccagcagcatgcatacctacaggggggattttcagctgttggtaaaagaactgacaggatggaaaaacagcggttatcgactgattcttgtctgccgttcggagacaagaggcaaacgtcttgtcaaagaccttgcagagtatgatctgttggctttttattcagaagacagggaccgggtgccggcgcctggagagattatgattattcacggcagtcttcataagggcatacagtatccgatgatcaaatttgccattatcgcagaatcagatatgtttggtgaagacaagaagaagcggagaaaacgccgacagcctgcatcggagggagagcgcatcagaagcttcaaagaactgtctgttggggactatgttgttcatgaaggacatggcgtcggtatttaccggggcatagaaaatgtagaagttgacggtgtggccaaggattatatcaagatagaatacggcggtggcggaagcctgtatattttggcgacaaatctggacatgatccagaaatatgcggataaagataccaaacaagtgaaggtcaataaaatgagcggaccggagtggacccgtaccaagacgaaggtaaaaggggcggtcagagagctggctatggatctggtaaagctgtatgctgcccgtcaggagtcagaaggatatgtctgtggcccggacactgtgtggcagcgggagtttgaagaaatgtttccgtatgaggagacgcaggatcagctggatgccatagaagcaacaaaacgtgatatggaaagtacaaagatcatggatcgacttgtctgcggtgatgtgggctttggcaagacagaagttgccattcgtgcagctttcaaaatggtgcaggagggacggcaatgcgcagtgctggtgccgacaacgattctggctcagcagcactacaatactttttgtcagcgtatgaaggaatatccagtgaatattggacttctttcgagattcagaacaaaggctgaacagaagaaaacactggaagatctcaaagccggacgggtggatattgttattggcacacatcgtcttctgtcgaaagatgtagagtttaagaaccttggtctgctggtggtagatgaggagcagcgatttggtgttacccacaaggagaagatcaaaaaaatcaaagagaatgtggatgtattgacattgacggccactccgattccgcgaacgatgcatatgagtctgatcggtattcgggatatgagtctgctggaggaagcaccggtggatcgtcagccgattcagacttatgtgatggaatataatgatgaattgatccgggaggctatcatgagagaactggccagaggcggtcaggtgtactatgtgtataacagagtcaatggtattgatgaaatcgctgcgggattgtcagaacttgtgccggatgcttcagtggcctatgcccatggacaaatgagtgagcgtgagctggagaaaattatgtatcagtttattaacggggagatcgatgtgcttgtctcaaccacgattattgagacagggcttgatatttccaatgtcaatacaatgatcattcatgatgcggataaacttggactttcacagctttatcagctgagagggcgtgtcggacgatccaacaggacatcctatgctttcctcatgtacaaacgtgacaaaatgctgaaggaagtggcagagaagcgtttatcggcaatcagagaatttacggaattgggatcgggataccggatcgcaatgagggatctggagatcagaggtgcaggtaatctgcttggtgaacggcagagtggacatatggaggctgtaggatatgatctgtactgcaagatgcttaaccaggctgtgatggaggcgaagggcgaaaagattcaggaagacttcgagacatctgttgatattgatattgatgcctttatcccatctgcctacattaaaaatgaatttcagaagctggatatgtataagcgaattgcgtcgatacagaatgcggatgaatatggtgagatgttggatgagctgatcgatcgtttcggggaattgccgaaaccggcggccaatctgcttcttgtggcgctgatccgtgcagaggcccatgcagccggtgttgttcagttggtgcataagggaaaagagaccaggatctatatgcatgagcgtgcagacgtggacgttgcggctattccggattttctggctgagtacggcagaaggatccagtttaaggcaacagcaaagaatccgtatttccttgtaaatatgaatggcttcaaaggtcaggggctgcttttggaagaaaaatcattggtagagaatatgctgagaattctctgccataaagagcttaattagaaaagctattgattcagagccctgaatggtgtaaaataaatcattatggaataccaagttttagataaggagaaggacagaatggctagaaagaaaaagaatgatttctgggatgatgtagaagatttgaatactgtttcagataatgatcagaccggagatgatgatacagcagaagttgctgtggatgaagaatggtcagctgtaaagagccttccgctgaaggtgatcatgcgttttctgctgatggtatcgtgtctggtggcacttgtgtcagcctatatcgcttatgaatatgtgaatgatcgttatgccggcggcagctacagcacagatttctttgacagtgcaagttttgcagatgaatataacaagagtatggatcagcttttgcaactggtacaggcaatggaggcagatccttctgtgacccaggcaggcaatgaagaactgctgacaacgcttgttgagaattatatgggcaaggatacgaacttctcatttatgattctggacagtgacaagtatcgtattgctgccagcggtgacgatgcgaaggatcgtattgaaggaagcaatcactatgtggctatttccaatgcggatggccagaccagcattcagagcccgattgcaggcaagcttctgaacaaggatgcatggacgaaggtcctttcggagaccagcaataagtatattatatattcagctgtcgataataccctggcacagccggattcattttacaaggcagagctgtcattcgagaaaatgggtgaatattttggtgctgcaagatttgttggcatcatagcagccgtcatttttgtcatttgtctcattttttgtattatgtcaacaggtatgaagcgtggctacgacggtgtttgtctgacatggtgggacagagtttttacagagattgcactggtggtgatgattgcagtggcaattgccctgggtgttggtgttcgcaagctgatgaagatggatggggatctgtatcattatggtgcagcagcactggcaattgtgacttatggatgggtgatccgttcctatttcagtattgtcagacgtatcaaagccggacgtcttctcagatgttccattatcggaacgattgtgggcggtatcagccgcggtattggcaagttgccgtctccattgaatgtgattgttggtgtagtgatcctggttgttattaacggtggattgatttatggtgttatcttcatgcgtcagtatacagttaagggtattccggttatgtttattgcagcgcctgttatctttatcatagaattgcttgcattgcttgtacatagtggcggcagtgatgatgaagatgacgaagtcgaggaagagacagaacaggaaccggttgatgaagaagatgatgtcagaattgcagcagcacctggaagaaagaatacacaggttcaggagactgagcgtgagcagaatacatcggcgaatgatgaaccgatggattgggaagcaatggatcttggcaaggcaattgcggaagcagagcgcagccagacccagaagagacagaatacatctgcagatattctcagtgagcagacggtactgaatgtgcaggatgacatgaccgaagggatgactggctatgtggcatctaatgttgtggatgtaacagacggaaagacagaagtcctttctgttgaggatgtagagaaagctatcagagaatcaggactgacacctgagattcagccgcgtccacaggcacagccggttcagacagcacagacggtaagacctgctgaagaaacagttgtgaatatggcacctgtgaaaccggtgaaagaacagccgacagcaaaacagccaattatggaagcagcagatgacggcagagtgaattttgtacagctcaacaaggatgtccgtaaagaattcagagcagcactcaaggccagaggtgtcggcgtcacagtgcgtgcgccggagaaaccggtgattattgatatcgacagaaacagtctgaagatgattattacagatatctttacacagattgagcgtttctcagcagacaatgagcgtgcatacgtggaagtttatcgtcaggacggcaaggtggtttacattgtgaagattaccgttgctccggataagacggaagaagcggtcaaggccgctaccggtgacaacagttttgacaatgcaagaaagattgttgaagcgaatgcaggacgttttgttgtggcgtttgataatggcatgatgaaagccggcatgatgattgatgctgcggaataattcgtcataaacatatagaatttgtaactgttcagagccaagcaaaatttcaaaaacaggtataaaatgcttgcatttttaagtctgtttttgaaattttatttggcggatacgccacaccgacgaaatgcgtagcattttggaggttggctctgaacagttactagaattttaataatgggatttggaaagagtgataatataggctcttttcaaatcccattattttatgtaataagaaattctgttggaattccctattacataaaaaggtactgcgtgccagaaagcgcagttcacggagagaaaaccgttttattgtattactttcgtaacgccaatgaaaagttgtttgtattatggcattattgatgaggtttttattgatgaaaatgtatgattttgatacaatgaataaaaggaggaaaatgaatttatagatgacaaatgataaatgaaagctagaaaggaaatttctaatttttaatataaataaaccaaagacattttcaaaatacaaaagcatacaatactgaatggagaaagaaagggagccaaatggcgaacacaaaacatgaagatgcgattttgaaaatggggtttgactattttcgtgacacgattttaaagatattggggatacaccatgactttgtagagagcggcattacggaacttgtggaattgacgatacattctttgtatatggattttacttttttgacaaaggatgatttttatattcatatagagttccagacgacggattccgggaagaaagaccttcgcagattccatgcgtatgagagtgtattatcccacaaaacagggaaaaatgtcattacatatgtgatttattccggtgggatagagcatgcagttacagaaatgaagtgcgggacgtatacctatcgtgtcataccaatatttctgacagcgaaagatgcagacagtgttttgaaacgtcttagggaaaagaaacaaaggggcgagatatttacagaagaagattttgcacagctggcaattacacccttaatgagcagcgagataaaacgaaaagatgttattctggaatcaataaagttaagtaaaacagaaaaaagcattacagcagaaaagacgatggcaatgctttatacactggcagataaattcctaacaggcaatgatttggaagaagtaaaggaggcagtggcaatgacgagaatcggacagatgatatttgatgatggtgttgttcgtggcagagaagaagaaagaagattgatgtctgcacttatttcaaaacttttgcaggcaaaacgtttggatgaccttcagcgtgcggcagaagatgaagaatacagagagcgtctgatgaaggaatttaatatttcttaagaggtataattatacgaaagataagcaaatacagcgaaaaataagaatgggtttcggaagaggcagtttaacacagatgcctcttttgaaacccattttgtttatgtgtggcatttttaatcctcttcaatgacctgtatttccaggtaatcaaagtcaatactgtcaatgaaattatcctgtgtgaatctggttttgctgtgacgtttgaagtcacgaatatttatatcaagccagatgggttcggaaaggtcaaaggtctggcaaatttctgtaacagcctgaaatattttggttgttcgggattcttcggaattgttacagacgaccagatcattggtcatacgattgtgaagaaatgtttttccccataaacggaacataaatacgcacctcctgtatgaacatcataacgataacctgtgtggatgtcaattgaaaactgtaatttcacaccgccagtttttggattgctgtggattttcgcggctgtttatggtatgattatcatcgggaaatttcgacatttcacaaaggagtacgaaatggaaagatatatatatataaattatgcatatgaagattatgagtatgtgcagaaaattattgaagatattgagaagacaggtgtgaaagtttatcacggcaacggaagcgaggaaagggtggcaggcagtttgtgtgtccttcatttctggacaccggcggcacacacttccaagagttatcggaaaattatgaattacacgctgaagcatgaactggatacgatgcttttccatctggatggggcacagatggcctcagaggtggatgttcagctggatgtgctgcatgcattgtttaagtacaagtatcagatgctgagcctgaaagcagcagatgctgaaacaaaggcggcggtaattaagaatgaatcaaagaatacagaaactataacaacagcagcaaagggagaaaatacagcggttgttgaaataaaaactgttgaatccaagccggaagttgtagaggccaaatctgtagatgaactgaaaaaagcaatggcttcttcggaaccgaaagttattaaattcaatgcagattcggtgacagaatcaaaggctgcagaaaaagaaccggaaatagtaaacgaaaagattgccgaagaacagccagatcagtctcagcagagtgaaccggctaaagcagtcgaagaattgaccacaagagatgctttatttgctgagggtatgcggattcttgagaatggcaccacaagagaagacggcgttaaagcatttaagtgcctgagacaggcggccagccaggggcatacggaagcccagtatcaattgagtgtctgctatgacaggggcattggtgtcagaagaaatatcacagaggcggccaagtggtgtcagatggcagcattcggcggtcatgccaaggcacagagtgagattggttactgttatgaatacggacagggggttgtccgtaatatcaaagaggctgtcagctggtatgagatggcttctgcccaggggaatattgaggccaagaataacctggcattctgctatcagaagggcagaggcgtacataagaatgtcaaagaggccattcgactctatggagaagccgcagcgggcggtcatgccagtgcacagtacaatctgggttactgttactggtacggcgagggcgtgaagacagataagagcagagccattgagttatttaagcagtctgcggataacggcaatgccaaagcggctcagatgctgaaaatactcagtcagcacttatttatgaagtaaggtgcctgacagggggatggataaatggacatcattgtcagtttttttgaaagtatcatagatggggttattgactggatcgtgaaccgatgtgtgaaagggtttaaaaacaggaggaagaacaatggatcatacaaaaatgccaatgaatgaagtgttgacaccggatgaaaagctggtggcggattttataaagacaagaacaaagaaagtactggacgatatccagaggctttcaaaagagcagaatgctgatatatcagaatgggcagagagttttgcctatctggcaagaacttacggcagagattccgatgaaactttcaagtggttcaaatactatttcagagagggcatgattccggccaacgtggcactgccactggttgtgcaggtatatcttgacagcagtgtagacggcggtttcgtcaatacatttgccaaggcattcaaacaggaaccggaagatgtcagaaatcagagaatcgaagacatgaaacaggaactggctgaatatattgatagtgacggcaatctgactgtttaccgcggcagctttgagcgcccatttggcagagaagacgacgccagcagagttattgagaaaggatttgctttcagcctggacagggaagtggcgaaaaactatgccacttgctggttccctgaaacagcgaagatttatgaagtgaaggcaccgctttcagatgtggcatggtacagcaattatgatgaggaaaagactgtcatcctgttgcctcagaataagggcggacattggacggtggcatctgaggaagttgttccgtcatccgaatacggttcggactctgaaaaagcagttgccgtacaggcttatgcttctacttttaagagaaagtaaagaaacggacagatgatagaagcactgacagaaagaagcgccgaaaatcggcaaagagcattcaggatatgaagtttttgagagatattacggagtttatttttcttgaagatctgccgaaaaaggcagatatcatcatcgtacccggcaatacatggccgcagcctgcaaggagggctgcggcgctgtatcaggtggggatggcaccttatattgtggtgtccggcagatacagcaaaggccggtcggcttttgaggggccatcctgtgacagggaatgttataagggcccttatgctgcagaagcggattttctgacagatgtgctgatgcaggcaggcgtgccgggagaagccattcttcaggaaagagaagccacatttactcttgaaaatgctgaatatatcaggaagatgctggaggaaaagcaccttccgataaaaagggccattatctgctgccaggcttttcatgccagaagatgcagaatgtattttgagtatgtatttcaggacagggagattgaattcctgatgtgcccagcggttacacagggcatcagccgtgataactgggcggaaagcaaaaaggggctggagacggttctgggagagctgagacgctgcggcgaacagttttcctggatgttgcagtagatagcaggaggagaaagtggacaattatattttaatgaatgatatggtgcaggaccatgaggcgcgtatgatgcatctgaagcgttattatccttttttcagattaatggataccggattgtcccagtacagggacggaagttacggacgcctggatatgtcatatattgtccttgccgtcctgcgtttttttattgaggcgaatcattttcaggatcagccggtatgctatgaggattacaggcaattcatggccggacttttggtgagagattttgattttaccgaagaagaggccgatgatgaactgtatcaatacatttttgataaattatgcaacgagggacgaccatttgaactggattactatgacccggccgcccatcagcagaaaacactgcgagtgcgtctgattgagagtgaactgaaagatcagcaggtactttacagaatttcatctgatgcggtggctttttatcttgatacaaaggaagttcgggaggaaagccatatcagcgttgcccagctgcttcttgagaagatgataaaagcgcagaatttcagaggcgggctggaggttatcgggcgcatcaacatggaagtgggacgcctgatggaggaacgacatgagatccagacacttttgaaccgccatgtgacggaggggcttgctgcactggagaattatcatgatcgtctgatgaagtggtttagtgaggaacagcgcctttttgcctcgaatatggcattgtctgcaagggctgtgcagaaaatggagacggacaggatcaccggtgaggcagcggaggaagtctatcagctggatacggcgctgaaaaatgccatgaagcgtcacgaagagctgatgcatgcttatatgcagatgcagaaggccggagatgaggcgcttgcaaaggcgaaaaggacacgttttcgtccttccgtggattttatggatgtgggacagcggatgatcgaggcggataatccggaactcctgacatatctggtgctgccactttttgcaccgaagataaagaagacatttccgatgtcccgggtggacgacctgctgctctataagccggaggaatcggcggcaggtgaactggtggaaaagggccgggagcagatgtatgtttatgaggatgaacttgcagaggagagaatgaaggacaatttcagttatcttctgagggtacttctggacaagattaaacagaaaaaagaagtaacgctggcacaacttaatgacctttatgccatgaaattcccggatcaggtactggaaaacagagattactatgcgtttcttgtacacctgagccagaaagaacattatgatctggatatgatcaaggatcatccggatacatttcttgaggataccatggcggattttctgaaggcgaatccgggatatgaaggactgaaattcaggctgatttatctgccggatgaaacaatctccattctggagcggtttgaaatgagtaatattcgatttgaaaggacggaagaataatggatcacagaaatctggacaaagcaatggagatatttgcatgtctgatcacaggagagacagtgggcagggaaaaccacagagatctctatgaagcctacagcagtcaggcggaggtttatgacattctggatgcggttttaaagaaatccaatcttcgtctttatgaatatcacaatacactatatgtgactgccggagatgagaacagggttttcggctacactaacgacgagctgaaaaaagccatcgggctgcgtctgaacagagaattatttctggcgtacctcattatttatgacgtgatgacgctgttttatgagaccacctccggggaggcagcactgacctatgtgaagacagatatggtcattgaaagtacaacagctctgctttccggtgtgatggcgagactggagacgattgttcagaatgatattgaggaaaacagtttcagaacattggcattattgtgggatgagctgcctctgatggctgaaaatgatgatatttccacattaaaggctgccagagggtcaaaaacaggttttgtcaagctggtcttcaattttctgatcacgcaggcgctttttgtggaatcggcgggcaaatattatataacggacagaatgcgggcgctggtcgagaactattttgacagctgcaaaggacggctgtatgaagtcattgaacagagcaggcggggcaatatggagaacattgagagaaaacggcagggtgatgtgaaggaacctgtgcaggaccgaaacagcaagacagaggaggatgaggaaaatgccgcatattaacagagtgcgtgtcaataatgtacgctataatttcggtacacagttttatgatgattttattatgcgctttgactgtaaaaatgtgctgtatgacctggccaacggcggcggcaaaagtgttcttttactgcttttgcttcagaatctgattccgaactgtacgctggatgacaagcagccggtggaaaaattatttcgcggtgaaggcggcagtacggtcatccattcattgatcgaatggaagctggacgattatcttgtcaaagatgattacagatatatgttgacgggattctgcgccagaaaggcaaaagatgatgaaaatcaaaatgcagcaggggacgcagcggcgattgaatattttaactatgtcattttttacagacattacaatgacaatgatatcgtgaatcttccgctcagtgacggtaaggaaagaattacatggccggggcttaaaaattacctcagaaatctttcaagaaaggattaccaactgcaggttcatttatttgagcgcaaaggtgaataccagcgttttatcagccggtatggactgtatgagagcgagtgggaaattatccgtgggatcaataagacggaaggtcatgtgcggacctattttgaaagtcattatcggacaacccgcaaggtggtggaggatcttctgatcgaggagattatccagaaagcatttatggcgcggacatcggaacgggctgaaaatggtgatagtatgtcgttgatggcggatacgttgtatcagatcaaagatcagttagcggagctgacccgcaagaaagcggaaatcggccagtatgatagacagcaggaagttatgcacagcctgggtgagcgaatccggacgctggatgttatgtatggtgaggaaatgacactgcggatggacattgccagagcatggcagactgtacttgccagacagaaaaacaggactgcggatctggcagcggccagaagagaacaggagctggcaaaggggcatatggaagactatgccagaaagctggagacggtcaaaatccagtccagcaaggaacagctggcctatcttgaaaaggaaacggccgactgcagcgaaaagcttgagaaattacagctggaacaggctgtcagcagggatgatctgaacctcagagagagtatgaatgattacctggaatatctggaagaacagcagaaatatcaggccgtggagaatacgattcgtcatagtacggatgggcagaaggagcagctggcacagcttcgggcttatgcaaaggcatggcagaaacgttgccagaagcggatgactgttttggatgatcgtattgtacaaggccggaaagaaatggaaaatcttcagcaaaagctggatgaactggcatcatcagagcgtgaagatgacagaatgctggcggttctggagcatcagtcccaggaaaaccgtgaaaaagagcaaatgtatctgaaggattttgcaaggctgagggaagcatcaggacttctggtgattgaggaagtcgataaggaactgctcagccagaaaaagaaactggaagcaaaggaagctgaactgatgcagctcatggaggatgcgaaagccgcagaggcagaaaaaaatgaacagcagcttcaggaagcccggaatacacagatgttgggacatatcaggacattaatccgtgagggcaatgaatttatggcagcctggcagcgggaatatgagcagatcgccaaactgcttcaggtctatcaggtgacagaagccggtttactcaaggagcatttgtttgcacgctatcgtaagcttgtgtgtgatattgaagaacgtcagagacaggaagctgcactgaaagaaaaaattcatcagttggaagatggcgggctgatgcgtatacctgcggatgttcaggattttatggattatatccgaacatgccatggcattacctgtgtttatggggctcagtatcttcaggaaacaaatgatgcagagcggcgtgcactgcttgcacggatgccgtttttgccgtacacagtgattttaaaagatggttttgcaaaagtagcggcggatgaacttttaaaggaaaaagatttcggggagcatgcgattcctgtggtcagtcttgaaacagtactttctgaagaggagccggtggagaagagccgactgctttttgccggaaaaggcagcagtttctatctggatgaaaatatgcgtcataaagtatgcgcacagagccgggagcagctgacagaacttcagcgggtgattgcccgaatggaggatcagcagcagacctatgaaaaagatatggagtcagtgagcagttttctccttgtctatgatagcaaaaaggaagaaaacagacaagcgcttcgggaaaaccagaagaaagagctggcgcttctggagaaacagaagttgatcaaagaccggatacagcagttggatgggcagctgtccggggatgctgtaagtattgaggaagccaggaagcaggcggagacggcaaaagagcagtatgcggtacttgagtcactgcgggatgtcaatatagcattgactgagacaaagcatctgatcgaagaagtcagacagaaatatggaaaattggcggcaaaaaagcaggaggaagaacagaccgcaactttgctgcgcaccaaaatgcaggaacagtcggaagtgtgtgaacatacagtcagtgagaaagatctgctgataaaagactgggaagataactggaagctttatgctgttgaaacagacggacagcagtttttgggtgaacagccgtcgaaaggacaggtgccggaagatttgacggatgatgcgctgcgggcggccttttatggcattcgtgacgcttatgagaaagaacatatggatctggatgacaaaaagcagctgatggaaagctatgcacgttctatggagcgtctgacaaagagtattgccgatagaaatctccagatggcgcgtatggaaaatctgcgggcggatggccagatttatcagacagcggctgagaatatcaggcagatcaggcaggaccttgagaatatggcacagcaggccgataatatgcggcagcagctgacggctattgaagcggacaagaatcgtctgtacggcagtgttgctcaggcagtcaatgtgattgaggaaaaatacggtgcctataaagaggtggcgttaaatgatcagagttatgaatcctacgtggagaatatgcgtcagctctatgaaaatacttcggcggagtatcgttcgctgactggacgtattgagcgtctgacaaaggaattgtatgcgttggagggaatcaggcatgatgtggaacgcttgatgaagctttgccatgtacaggaaaatctgacaacagaaacattggatgagcagatcggattgaagcgcagatatgaggaacttctgagacgttatgagcagatgcagtcccagtattttgcaaaaagagatgcgtttgaaaaggacaaagccaaagcagtgtcagaactgcatcagttaggtgcagaaggtctggcggcagaacttcgtgaacatctcagccttccggagaatgcagaagcggcaggcagagtgatgcaggaaattgaggaaaccattgccctgatccgtatagagaaagagcgtgtcggaaaaaacatggaagaccttgtcagcatcaaggacagttttgaaagtcagtgtcttcagatttgtcagaacatccggatggaactggataaactgccgaagatgtctgcgattgtcatggataacgagcagattcagatggtcggccttaccattccttatgttaaagagcatttttacaaagagaaaatgtctgcttatattgatgatattgttaatcaatcggatacccttggaacgcaggaagagaaaatgcgctatatccggcaacagttggcctggaagcggctgttttcggtgattgtaacagatatgaatgccattcggctgacactctacaagagagagagaattgccagccaaagtcgttatctgaagtatgaagaggcggtgggcagtacagggcagtcccagggaatttatattcagttcctgattgcagtgatccattatatttcagctattcatgcaggcgcggctgcaggtgagcatctcaggaaagtcctgtttattgataatccatttggcgcagccaaggatatttatatctgggagcctatttttgccttattaaaaaccaatgatgtacagttgattgttccggcaagaggtgcaacgccggcaattacaggtaaatttgatgtcaattatgttttgggacagaagctgatgaatcatcgtcagcagacaatcgtcgtagattatcactccaatgtgaagattgacgaaatggaatatgtgaagattaattatgagcaggaagtttttgactttgtttagggcgttagttgtcaagtgtttacttgtgtgttaaaatgcccttagcggagccgacggctttgcagtgaggagatgaataaattggagaataataagataaatgaaggcgcgctgaccaagcagatcaagacccttgtgatgcaggagcgttatgaagaagccatgaaggttctggatgagattgaagtcagcaagatccgcaatatctctatcctttgcctggtcggtgaagtttatatgggcctgaagcgttatgatgaagcagaacagatacttctgcgtgtttatgagaagaatccgaatacaagacgaatccttgatctgctgacaacattgtatattgataaaggtgagtattctgaggcagaatattattataaagagttcattggtgtggcatccagagatctgcatcgctacattctgagatacagattggataagggcaaaggggaacgtctttctgttttgatcgatacccttgagaagttaaaagattatgaatacatagaggagtgggcttatgagctggcgactttatatgaggccagcggtgagacgaagaaatgtattcatgaatgtgatgagatcgtgctgtggtttggccatggagaatatgtggacaaggccattgcgctgaaatgtaaattgacaggtgagccgctgccggagatttcaacggttgaacagcatcgcgttgaggaagaacagcgtgcggcccatgagaagcagctgacagaatctataggtgcagagatgggcattgagggttttgccggtgcggattatgagggaagcattgatcttgatctcattcagcgggcaatggatggggcagcgcctgaagcggcagatgaaccgattgtcgaaacagctgtgacagaggacacacttcgggatgaagtgattgtggaagagccggtattagaagaaaatgaagagtcggcgggaagcgctgaaggtgaagagacgcaggatgcggcaatggccgttgatgcgggaaatacagacagcgaaacggtgaatgcagatggaaatacggcagatgatgacgggcatgcagagtctgctgatgaagacagtgaagcagaacagccggatgaagacagtgaagcagaacaaccggatgaagacagtgaagcagaacaaccggatgaagaaaatgagaagtctcatattgcccatctgttcagctcattgatgtttggcaggaaagagaaagagaagcattttgactggtctactctgaaattggccaaagaaaaaggggaaaagcctgacgagatcgaactggctgctgcagcgatcactgccgcccagagccaggagagtcaggcaggcgagaaggatgaagatattttccttcatgaggaaatgcctgttgaggaaatgtcagagaatacggtggcagaggatgcaccggagaaagaagtgccggaatcagaagaagccgaagatgcagcgatttctacagagggactcagcgaggaggatgcagatttcttcggcaaactgatgggtgaagatcttgttgcggattacacacgcagccaggacagtgaagaggagatcattgtggatgatgatggtgtgtcagaggatacggttattatcgatgatgatgatgatgattcagagaatgaagcaccagaagctgcagctgcggaagatgaaattatcatagacggtgatgacgagaaggatgaagtcattccggagacaaaagaggatacattggatgatctgtttggcatcgccggtgaagtccatgaagatgagctgatagatgatgatgacgaagatgaagtgatctcggaggatgacagcagcagtcagaatgattcggcggacgaagaagaggatgaagatgacgaggaggatgagatctcggatgatattcatgcctctgatacagttctggatattttcggcacggtgacaggtgtagagagtattaagagtcagttggcgaagacattcaccaagtttgaagatccggcacttgacaatatggacttgctggcaccgtatgatattaactttgttgtaaccggttatgatatgagcgtcaagtcccagatcgccattggtattgcaaaggccttgaatacatatggcatctgtgataagaacaagcttgtccgagcaacggcacaggatctgaacggccgggatttttctatgatctttgagaaattgaaaggcggctgcctgatcattgatggagcagatatgctggatgataaggctgcgggcattattgttgattttgttcagcaggacaatcaggacgtagccattgttctggaaggcgaagaggataagatcaaggaattattcagaaaatatccggttcttcacagcaagttcctgaatatcattcatattggcaagtacaatgagaatgaacttgttcagctggcagagggatacgccaagaagaaaggctatgagatctcaggaccgggagcagcttcgctgaagacattgctgcgtgaacgtatgcaggatggctattcggttgattatgaagatattatggccattattgaggaagcgattgccagcctcgaaaagcgcaacatgaagaatcttttcatgactgttcttgacaataaatacgaagaagcagccatgttcatgcttcagccggaggactttaagaacatcaacataccggactaaagcaggctataatgggaatattggtatactgtctataaatgctataaaaactgcattgtaccgggatataaaataaacgcagtatggtcagtaaaattcaaaaagggattctgaacgggactattttcacacaggtgcttcagcgcttgtcggtacttaggtggtgtttttgtcaccttatgtaccgttatcagcgctggcagcgagagcggcctgtgaaaaatagctcgtttagaatcccttttcagatatttgaagtccgtactgcacttatttggggtactgcagcttttgaacctaaaaaaaattggtccgacaaaaaaataactgagttgtcacaaatattcgaacatccgattgcgtgcaagcaataaaaaatatttcgcatggtaattaatataagtacaaactattgtatactatgtgcaattttgactgattttgaatttattatgaaaagtcaactgtgcctttttcacaaaataattcgacgaatttcaataaaatagcggaattaatgaattttaggaataaaaaacttactttttggaacgttgaaaagttggtcaaaatcttgacaaaacattctaaaacgtgtaggatgtatgtagtggcgtttctgagagattcattacatatttaatctggtatgaatatgtgtgattaagaagcttactgaaataaggaggtatttattttgagaatcttagtatgtgtaaaacaggtacctgatactgcagagattaagatcgatccagtaacgaatacactgattcgtgcaggtgtaccaagtattgtcaatccatttgatgcatgcgcacttgaagttgcagcaagaatcaaagacgcagatccaagcacagagattacattattatccatgggtccagatcaggcaaaggatgcattaagagagtgtctcgcagttggcggcgacaaagcatatctttgcagcgacagaaaattcggcggttctgatacactggctacaagctacatcttagcttcagctatccagtctatcgaagagaaagaaggcaaatttgacctcatccttgctggtaaacaggctatcgatggtgatacaggtcaggttggtcctgaaattgcagcacatatgggtcttgcacaggttacatatgcagcagaagtttctgtagaaggcgatgatatcatcgttaagagagaaagcgacaaaggttatgatatgatttctgttcagaaaccagcaatcgtaacagttgttaagactgaatttgagccaagatatcctacgatcaagagtaagatggcagcccgcaagaaagaaatcacagttatcacatcagaagatattccgaatatcgatctgacacgttgtggtcttaagggttctcctacaaaggttagaaagacatttacaccagtgaagaataagaactgtgtaatggttaatgaaggcgaagttgaagtatcagcagttaagcttgttgatttgcttgtagacgccaaagtactgtaaggaggatatgggcatgagttttgaagaatataagaatctttgggtatttgtagagacagaagagaatgaagtaaagccagttggctacgaacttcttaatccaggccgtgaacttgcagataagatgggcgctaagcttgttgcagttgttatcggcggtaaggttgaagatatcgctaagaaagcaatcgaatacggtgctgacgaagctattctcgttgaaggcgacgaatactttaactatacaacagatgcatacagcatcgctatgaagacacttgttgacaagcataaaccatcagcaatcctgatcggtgctaccaacaacggccgtgaccttggtcctaagatggcttgtgatctgaatacaggtcttacagctgactgtacaggtcttgactatgatgtagaagctggcaacatggtttggacacgtccggcattcggtggtaacctgatggctatgattctttgcccagacaaccgtccgcagcttggtacagttcgtccaggtgtattcaagaaacctgaactggttgaaggcagagagggtacaatcactcgtgaagatatccatgtagctgctgatcagatcagaacaaaactgatcgagagaatcgaagaagttgctgaagctgttaaccttgaagaagctgaaatcatcgtttccggtggtcgtggtgtaggttcagaagaaggctttggtgttatccgtgagttagcagatgtacttggggcaacagtaggtgcttcccgtgcagctgttgatgaaggttggattccacgtgcacatcaggtaggccagacaggtaagactgtaggtcctaagctgtacatcgcttgtggtatttccggtgctatccagcatgctgctggtatctctggttctgattgcatcgtagcaatcaacaaagacccagatgcacctatctttgatgttgctgattatggtatcgttggtgacctgttcactatcatccctatcatgatcgatcagatcaagaaagtaaacgcataatttcataccagatgtattatgtttgccctgcggctttggccgcggggctttttgtatgccgcgggggaaaatttcgaatacgtcatggttaagcgttggcaaagagaataaatgaaaatgatttacgttactgttaatgataagttattatcaactaacttaaaataactgagaaaattttattgctaaatcctattaagagaatttatcatttaagccgcatgtttagcggctttttttaattgacagcttttttcttacgcgataaaatactaatcgttagcagaacctaactgaatgaaaggatattatgatgaagagaataataagaactattatgatgtctgcgataattgctattttgacagcctgttccgggagaaatgtttcaatggaaactgaggtctcttctgaggtgagttctgaaaacgttgtcacatcttcggaactgacttcagaaaatgcttctgatgatgcagaggcggtcagagatgtttttgccatggatacctatatgacagtgaaggcttacggttctaacggtgatgcggctgttgatgcagcggtggatgagattaaccgactggatgcgctgttgtccacaggtaagaaagacagcgagattgggcagattaatgcgaataacggcggacagttatcagaagatggtgcggtactgatggaacgttctctggaactttataaaagcaccaatggcgcatttgatgtggcgatttacccagtgatgaaggcctggggatttactgacggcaattatcaggtgccggatgcagacacattgaaggcaacgctggaactggcggatccttctttgattgattatgacaaggagacttcaaccgtcagcttcaaaaaggatggtgtccagattgatctcggtggtattgccaagggctatacatcctccaggattatggatatttacaaggagaagggtgtgacaagcggcctggtaaatctgggaggaaatgcccaggtatttggtacaaaaccagatggcagcttgtggcgtgtagcggttcagagccccgattcagaagatgaatatctgggggttcttgagacgaaggataaggccattattacatccggcggttatgagcgctattttgaaaaagacggtgtgacatatcatcacattatcgacccgtcaacaggatatccggcggataacggcttaatttccgtaaccattgtcagtgcggacggtacattggcagatggtctttctacatctttgtttgttatgggaaaggaaaaagccactgattactggaaagcgcacagtgatgaatttgatatgattctcctgacagatgatgaaaagctttatgtctcagagggcattaaagacagctttacatcggacagagaatttgaaattgtagaaaagtagaagaggatgacgcaggatgaagttttggaaaagatttggcggctatatgccgattcttgcgacaattgttgtcgtgggatgcgtcggtacggcgctgaaaggctatgcagcgccggtttatgaggtagagcagccggaaaacattcagagtaccgaagcagatgcaaaagagaaaaagcaggaaacagaagaaactgagcaggccaagaagggaaacttcgatttggcagatggtttttacaagggcagcggcaccggttttgcgggtacagtttctgtttctgtagaaattaaagacaagagtattgttgcaatcaatattctcagcacccaggatgatgaggctttctttaacagagccaagggtgtcattgacaaaattattgccggacagacactggatgtggacgtggtgtccggggcaacctacagctccaacggtatcatcagtgctgtaaagaatgccctgaccggagagcaggatacaagcacaccggctacgacggcaagcagcagcaatcagagttcaccatccatcgaaactgtggatgattccaatcagacatggaaagacggcacctattatggcagcggtaccggatttaatggtgaagtgcaggttgaggtggtgattgctgatgggaaaatcagcaatatcagcgtggtcagccataatgatgacagtagttttatgagtcaggctcagggattgattccgaatatcatcagttcccagagtaccaatgtggatgcggtttcaggtgctacttacagttccagaggtattattgatgcggtgcgtgcggcactgaaacaggcagtagttaatggctcttcaaatgatgccgatgacagcaatgatgacaataacaataatgataataacaacagcaacaataattcgacaattgtcgaaggaaaagtaccttacgaagagggtatctattatggcacaggtgaaggatatgccggagatattcagctggcagttgtgatccaggataagaccatcaaagccatactggtgacagaatgtgaagatgatgctgctttctttaacagagccaagagtatcattaacgaagtcctgaaaaaccagtcaacagatttgtcaggtattgacactgtgtctggagcaacgtacagctccaacggtattgttgaagccctgagggaagctttcaaagcagctgaaaacggtaacagcggtaaaccagcagaatcggaaacggagacagagacagaaactgaaactgagacggaaagtgaaacagagacagacaataaggacagcgtttatattgatggtgcctataccgtctctgttgtgtgtgaaccggatgaagatcaggattttgaagcttacaatctgtccatgaccgttcatatcaaagatgacaaaattacagcagtcacagacattgtcggtgatggcgatcaatccaatgaaagctatatcaaacgtgcagcagaaggtacttcaaaactgccgggggttgtaacgcagattacagaaaaaggtggccttgatgccgttgatacggtgacaagagcaacttgctcatccaataccattatcgagggatgccagaaggcactgaaagcagcaaagcgtacaccggaagaaacagatgagacagaaccgggagaaagcgagacagagaaaccggcaaacagaacttatgcagatggcacctataccgtttctgttatctgtgagccggatgcagatggagattttgaagcttacgatttgaccatgacggttcaaattgaaaatgaccggattacagatatttcaggcatcagcggcaatggtgacagcgacaatgacagctatataaaaaaagcggcccagggtacttcaaagtatgtgggtgtggtgacacaaattacagaaaaaggtatgccggaaggcattgatgcagttgcaagagcaacctgttcctccaatgcgattatcgaaggctgccagaaagcactggatgaagcaaaaaaactggcagaggaaggtaaatagagatgaagacattttcggttcgagcggtgaatctggtacttatcgttgcattgttaatcggctataacactgtattgacattgcgggataaggatgatcagattgcgaaactgacagcagacctggaaagtgccaatttatataagcagtctgtcatgcagtcccaggaggatgcggcaggcggcagttatgaagatggcatctggaaaggcgaggcacagggatttggcggagccattcgggtggaagtcaccgttgagggcggttccattacagatatcagtattgtatcagcagaaaaggaggatggcgcttatctttccatggcggaggatattatcccgacaatcattgatgcacagagcgcagatgtagatacgatcagcggagcaacattcagctccaccgggattaaaaatgcagttgcgcaggcattggaagaggcggcaaaataaatgagcaaaatcgatatacatcatcttacaaaaaagcagcgcaagcagatgcacggctggcttcgggcaatcatacaacttttatatttcctgtttctgccctcagcttatacagccgcttttgcaggcgtcaaatatattttcacacagttgggtgcaggagaaaaaatcggtctgacatcttttgtgtcggtactgattgtcctgtgtttgtataccattgtattcgggcgtttcttctgtggatttgcctgtgcattcggaagttttggggatgcagttcactttgtctatgtgtggatttgcaaaaaaatcaagaaaaagccggtgaaactgccagaaacagtaacttcaaaactttcaaaggtgaaatacgttgtgttggctgtgattgtactcctttgcttcaaaggtgtgtacagtcagacacaggggtacagtccatgggatgttttctctatgctgcatgcctttaactttaagttaggcggctatctgctgggaattgtcctgctggtactgattatggtgggcatggcccttcaggaaagatttttctgtcgattcctgtgtccgatgggtgcagtattctcattactgccgatgctgccgttcttcacccttaagagagaacgggaacagtgtatcaaaggctgcagtgcctgtacaaaacaatgtccgtcagacatcggtctgccggaggccggttcgctggatgtcagcggtgactgtttccagtgccagaaatgtattgacacctgtccacggatgaatatccattgtggactgccggggatcaaaggcaatgaagtggtattgactttaatcagggcattgattttatttggcctatttatctggctgggaatttaagtattggcgtaagaaaaatcgccggaaaatgagtgattgaatcaaaaaacaggggctggggtgccattggcatacagctccataaaaaggattaatgattagcgtgtgctaacgctgatttttaataaatggctcgatttgagtcggattttacactaaatgcataattcaaatttcatacttataaggaggacgatatgaaaaagaatgaattaattaataagacattggccggtctgatgattgcagcaatgacagccggcgtgtgcccgacaactgcatttgcggtgactgagggacaggttgcgaaggatggaacttataaagcaacagcacatgtaagtcgaacagcagaagatgatgaaaatgataatgaatgggatgaatacgatgtggaagtatccctcacggttgaagatggcaagttcaaagacattactgtgacacctggtgcgggttatgattctgttaattctagctattttaacaaggcgtataattccaatacgagtaaaaacaaaggcattaagacgattctggaaggacaggcagcgactgcagagaatattgcttcctgggatacagttacaggtgcaacacgtactaaagacgcaatcaaaaaagcggcaacagatgcacttgctgaggcagaagaagcaccagcagcagttgaagtgaatacagaagcacttcaggcagctatcacaaatgcagaagctttggaggaagcagattatacagcaaattcctgggcagcgatgcagagcgctttaacagcagccaaagatgcagcaactaagaaggaaagccaggatgcggttgatacagcagaaaagaatctgacaacagccgttgcaaaccttaaaaaagcagaagtgaaggtagatacaactgctcttgaagcagctatcacaaatgcagaagctttgaaagaagccgattataccgcagacagctggaagacaatgcagacagctctgacagaagcaaagtcagcgcttggagcaaaggaaagccaggaaaaggttgatgcagcagctcagaaattgacagaagctgttggtaaacttcaaaaggcagaagtagcgacaacaaaataccttgtcatgaatgtgccatataataaattctatgaagcctatcacctgacagataaggcagtatgggaagtagaaagcggtgttgacgctgtttctacagcgacaaccaataagtttaaaggtagcacaggtctggcaaaaggcacttataataatggcaaatacatcatgggcgtgacacttcctgtggaagtcagtgccgaggattataagaaactgaatgcgtcattaacagaaaatgatgattattacttcacaacattggatacagcgccagaagcatacagcaaactgacaatcaatgaggatggctcctatagtttctctaaagtaagcgatgcaacagtcaccaacaaatatctctctgttggtgaacttgatctgaatggcggttatggcgattatcaggtgacaattgacggtcttggtacaaaagatggcatgaaaatcggcgaatcagagacaaagccatatacactttacggtgcaattctcaatacaactgcaggcaagagttatggtatgacaacactcgagaacacctggcttggcacaaaacatccaaatgttgagattgcatggtctattaaagaaggccagggattaagaagagcacatggaagcggagatctgttctatcagtttgcagatatgaatggtgcaactttaagcagtgtgacattaattacaagtctcggaactattgaagtaccttgcaatgtcgaattaacaaaatactatgaaggagatctcagtggcctgaaatatgcgttggaaaatgattcaaaagaattatctatcagtggcattcctgcagatcttaaagatgtaaaagtatctgtatccggtggattagcaacagatgcggaggtaaaagacggtaaagttgctctgacagcagcgccaacagccggcacgcagtacaccattacaatcagtagcagcaactatccggatattacaagaaaaacttcgacacctattacagaagaacagaaagcggaacttcagaaatggatcgataaagcagagaagacaagtggatacgacaataatgcagatttgaaagagcacgtcaaagaagcacaggatatgattgccaataaagaagctttatctgcagatgctaaagaactgattgctgaattagtgtccaaagtaaaagcgacatacgcaaaagcagaagcctctgcaacattagaaggctctaaattgactgttacactggatggtgtagaactgtctgaacttgaaaatcctacgtatactgtaacttatagacagggacgcggtatggcgactttaacaagtggcaatttgggtgcactgacagttacattagataaagcaccaacggttggaaccgactatacagtaaccattgtcagcgataattatcaggatatcaagacaaccgttaaggctgaagaagatccatctgattatgaatatgtcctgatgaacatcccatattcagcattctacaaagaggaagtgaacaatgatgtggatgtagatgtatttacatcagcaacattgaacaagacaagaacagcttctctggcgggcggttcctatcatgtaaatgcagacggcagtcagattgatggtattacattccctgtaaaagtggataagaacgttgatctgtcaaagtacaaacaggtgacagatacagattctgttgatatcacagttacaatcaaaggacagacaagtacaacaacttatacaggcaaagaggcactcttccagaatgaagattatgcatattataatctgacagaagtaccttcttgttataaggaagtatctgtggatggagatggcaatttgaaattcggcaagacagttggtgatgtgacaacactggagagcttaagtgcagaactgtcaacggagacccgttacggcgattatcagttggatattgatggccttcgtaataaactgacagatcatggcgcaacaaaaatcaatggtgttgtgatcaatacaaaagagggtagcagctacggtctgcgtcatcttgaaaacatctggaaaatgaaagaactggcttggtcaacaggctttacagaatctgttcatgggtgcccgacttcatctgctcattataaagcaatgatgggtcagaccattacttctgttacctgctatacagataaaggcatgtacaatattccacttgcggatatttatgtaccggttaaattcacacatgaccttgaagtagccaatgcagctgttacagcaggcaagacagaagctactgtaaccggtcttccgaaagattatgttgctgagtataaagtggatggtcttgacggagtaagcgttcagaagggtgtattaacattcagcaatgcaaagaaaggtaaatacacattaacaatttctgataagaatggcaaatatgcagatattacaacagaatttgaactttacacagaagcaatgccagctgcatatgatgcggataagaaggcacttgttaagacagcagatgcggcagatgaagaatttgctgattacatcaagaatattacaagtgtcaatgtcaatggtacagattacaaagcatcaggtcacggtgcaacagttattattaatgaagatggttctattaagacagatgcagcaccatttgcagaaggtgatacatttgagatcacagtaagtgcaactggttatttaccacagagcttcacttatacaacaaaagtggcgcctgctccagcagaagtcaacacagcaacgcttgaagcaactattgccaaggcagaaggactgaaagcggctgattacacagcagacagctggaaagcaatgcagacatctctgacatcagcaaaggcagcccttgaagcaaaagagtcacaggaagcagtggatgcagcatcagcaagtctccagtcttctattgatgcactgaaagcagcaacacctgctgaatcagaggatgacaagaaggatgagacagaggctgtggatacagcggcgctcgaaaaagtgattgcgacagcgaagggactcaataagaatgattatacagctacaacatggacgaccatgcaggctgcattaaccaatgctgaaaaagcccttgaagcaaaagaatcacagacatctgtagatgaagcggctaagacattgcaggcagcaattgatggtctgaagaaggcttctgcaacaacgacaaccaccgacgacaagaagaataacaacaacagcagcaacaagaacaataataacagcaatacgaataacaataagaacaatacaacaaatagttctacaaataagaacagcacaactagtccaaagacaggcgatcctgtcagcgtgatgggattacttggcgcagctatttcctctgttggccttggtggtcttggattgaaactcagaaagagatccagaaaacagaaataatgatgcgttgtaatcagtaagcaacatgcaaaaagcagcaatcatcgaaagatgacggctgctttttgtgttatatgtcagatgagtggtgattaggcttctctgatcagtgtcagtaacattttaaactgcgtgatagctttaacggcatgcggaacaccacaaggcaaaataatcgcatgtccgcctgtgacacggtttggtgtgccgtcaatcgtaatctcagcttcgccttcgagaacaaaagccattgcatcgccgcctgccgcatgcgtgctgatggcttcatcggcatcaaaagcgaaaagtgtcatgccggatgctggctgctgggcaagtgtcagactgacaactttgccgctttcatactgaacctggtctgccactgaaaatggggttgctttttctacatttttaatcaattccattgtagaatcctccttggataaaatgctttgaatgtatatatctatttctgtaacgttatctgcaggagtttaaaaccgcctgcaccgccaatcgcatgcgatgttccagatggaatcatcaaactgtcgccggttttcagcagatatttggcattgccaataaaaagtggcatttcgccttcaagtacagtgtaaagggtatcaccaaaataaatttcctcactgacactttcaccagaaccaaaagccatcagcatgatttgacaggtgtcacttttagaaagtgacatgctgacgacacggccttcacggatatcgatcagagaagccaggtttgcgggggcgtcagttggaagattgcgtaaagtatccataaaatgcgttcctcctattaaatatcagtttatcttagtttgtacgataagtctgttgttataacaacaaaaaaagtcacttttataagggaatgcttttatcacaagcgtatttctgatatgataggaacaaaagaaatgaggggaaagcaaatgacagaagtaaaaattttatatgaagataaagatatcattgttgttgtcaagccagccgggatggcttctcaggaagaacggtcggtggatgtggatatggtcagctggctgaagacttatcttgtacgccagaagaaagtcaaaggaatgccctatattggtgtgattcatcgtctggataagccagtgggcggggtcatggtgtatgccaaaacgcagcaggcagcagcgaagctcagtgagcaggtacgaaataataagatgaccaaagaatatctggcggttttgaccggcacacttccaaaaaaagaaggacggctggaagacatgctgcttagcaatggcaaaacgaatcggacagaggttgtggaggggaaaatagcaggtgccaaaaaagcagtgctcgaatataaagtgaagcggacaaagtttgaagaaggacagcagtattcattggtgaatgttcatttgatcacagggcgaagacatcagatccgtgttcagatggcgcatgctggagcaggcctgtggggagatacaaggtataatccagtatttgcggatcaaaaaggctggtttaatctggcactttttgcctggcatctggaatttgaacatccggtaacaaagaagcgtcttatttttaaagaaccggcaggaccacagattacggcacattttaaaaccgaagaatgtaaataattttgtcgataaattcctgttgacgtacagaaaactgtacgttatcataagaatatagaagaatggaggtgctgaaatgttggctgtaaattatacttgcttacgtgataatatgaaacgatacatggatcaagtgacagatgattatgaaacaataattgttacacggaagaataataaaaatgtcgtcatgatgtctgaggaaatgtacaacaatttaatggagaatgttcacattgtcagcagtaaagcaaattttgaatggttaatgcaatctaaacagcaattggaagcaggaaatttttcacagcatgaattggcagaggtggatgatgaataaagtgtttacttcaaatggatgggaggattacatctattggcaaactgaagataaaaaaacactgaagaagataaatacattattaaaagatattgatcggaatggtaatgaaggtatcggaaaaccagagcctcttattggcaatttatctggattttggagtcggagaattaatgaaaaggatagattaatttataaaattgacgagtacaatatttatatcctgtcctgtcgatatcattataatgatacatagtggagtgaattagaagatgaacagaacagtgatgatcagattggcgacaccggaggatgctgctgagatgttaaaaatatatgcccattatgtggtaaatacagcgatttcatttgagtatgaagtaccgtcggaagaagaattcagagaaagaatcgaaagcactctcaagcggtatccctatatcgtggctgaacaggaaggacatatcatcggctatgcttatgtatcgatttttcatgaaagaaaggcttatgattgggctgtggaaacgtcgatttatgtggataaagactacaaacgcagcggctgcggaaaacttttgtatcaggcacttgagaagattctcaagaaacagcatatcagcaatctgtatgcctgcattgcctatacagagcatgaggacgaacatctgacaaatgacagtatgcattttcatgagcatctgggatatgaattggtgggcacatttaagaagtgcggctataagttcaatagatggtatgacatgatctggatggagaagatgatcggggaacatccggagaatccggaagcatttattccattttcggagatggatgtccgggagatatttgaactcattttatagggttttatgaactatggttgcgcgattttatttttctttttctaagaattttttatacgtcatatccattcccagagccccaagtggcgctgtaataataaaatcatcaaaacggcagaaaggccggcttccaatgtgtaacggatatccacagcggcacccacaagaacaaagaggatgacttcagctgccagccagagtttgccgaatttctcagataatcttttggatacgaaagttgtacttttggctttcagaacgcaggccatactgacaacagccagcagaccggaaacagagactttgccctcaagtcatccttcaatggcaatgagcagaaaagaaaagccaaggacgatgatgacttatttgtggagaagtgcaagggaaaattcatttacacagtcgttataaggcaaaaaatcttgacaaaggccatctcctgtcataaaatgatttttgtgaaaacatatttatatgtgaatgacagtgaagaggatcagtagtctgcgtcagtggctcagagaggatatcagcggtgtgaggtgtctccatatgtacagatgaacctgccttggagttctgtatgaaagtacagcgcacgtccggcgttatggacaattgagcggaagtcttcagtatatgaatcaggacagatgcagtatctgctgtctgacattttcgaggcaatcgagtggagatttcaaatagggtggtaccgccgaatgaattttggtccctgttcagccgatggctggcagtggaaggaatagataaggggaagtgctttctgctgcagcagagcgtacttccccttttgctgtcaaaaaggcagtaagagactgatgttgcgccaattggcgtatcgtaaaagatgagatataggaggctgtaaaaatggcaaaagaaaagaagcaggttcgtgagattacatccatgagcgaagattttgcgcagtggtatacagacgttgttgtcaaagcaggtctgattggttatacaagcgttaaaggttgcatggcaattaaaccggcaggttatgcgatctgggaaaatatccagcatgaattggataaacgtttcaaggcaacaggtgttgaaaatgtttatatgccaatgtttattcctgaaagtctgctccagaaagagaaagaccatgtagaaggttttgcaccggaagttgcatgggtaacccatggcggtctgaatgaacttcaggaaagaatgtgtgtccgcccgacatccgagacattattctgcgatttctatgccaaagaaatccagtcttatcgtgatctgccaaagttatacaatcagtggtgctccgttgtaagatgggagaaagagacacgtccgttcctacgttccagagaattcctgtggcaggaaggccataccgcccatgctacagcagaagaatccaaagagagaacagaacagatgctgaatctctatgcagatttctgtgagcaggtactggctatgcctgttatcagaggtcagaagacagagaaggagaaatttgccggtgcagaagcaacctataccatcgaagcattaatgcatgacggcaaggcccttcagtccggtacaagccacaacttcggtgatggttttgcaagagccttcggcattcagtacacagataaagaaaataaactgcagtatgtccatcagacatcctggggtatgacaacccgtctgatcggtgctattatcatggttcacggtgacgacaatggtcttgttctgcctccaatgatcgctccgacacaggtgattgttattccaattgcccagcacaaggaaggtgtccttgaaaaagcagaagaattaagagacagattgagcggattcagagttaaactggacgcaacagacaacaaacctggctggaagtttgcagaggcagagatgcgcggtatccctgttcgtgttgaaatcggacctaaggatatcgaagccaatcaggctgtcctggcacgccgtgatacaggtgagaagattgttgtcagcctggatgaacttgagacaaaagtagatgaacttctgaaagaaattcagtccaatatgttcgagaaagcacgtgcacacagagatgcacacacttatgtggccacaaactatgatgaattcaaggatattattgccaataagcctggatttgtaaaagcgatgtggtgtggtgatcgtgcctgcgaagacaagatcaaagaagaaacaacagccacatccagatgtatgccatttgcacaggaacatttatccgatgtatgcgtatgctgcggacgtccggctaagaagatggtgtactggggaaaggcatactaaaatggatattaatcgacttcgtatgtttattgctgtagcagattgtctgaattttacaaaagctgcagaaaaactctatatcagccagccgacattgagtcggtatataagtgaactggaagaaacaatggaggtcgaattatttgaaagaactacccgccgtgtcgtattgacaaaggcgggtaagcttttttatgacgaaagccttcaaattataaaaaaatacgatgccttgattaatcgcgttgcccgattgggaacaggtttgtcaggaacgttaaaagtgggctatcttgaactgtttacgcagaatattttgcccgttgccattagaagttttcatgaaaagtttccaatggttgatatgcaattaagagagaccaggttacaggaagccaatcaaaaagttttagatggagaattggatgttggttttgtcattacacatgatatgttggagcgcaaaccagaattggaatatcgccatatttatgcaggacaggttgaactgatcgtaagtaatcaacatccattagctgcctatcaaatggtgaatccactgatgttgaaagatgaaaagattttaatgtttgatgcaggggagacacctgagttgcaggaacagattaccaacatgtgtatgaaagcaggctttatgccgaattttattacagggaatttttcgcctggggctatttttttgatggtacaggcagggatgggtgtctctttgctctcgtcattaattacatctgtacttttgacagatgatagatttcatacattgacccttgaaggcatacaggctgttgctaatctggagatgatctggagaaaagataatgataacccttgtatccagaattttgtcagtgaggttgaagaagcagcacatcctaccgtgccaaatatctcaaaattgtattgataaaaataaaacattcatgcctattttaaataaatgaatggtgaatccatttagttctgatatttcaattttaaagaaaaagtctatataattataagcagaaagaatccggattatcttttgaaaaatatagtggaggatatatttgatgaaaaagattgattttgaagcacattattatacgcaggactttttcgatgcaattgctgacagagaaggaattccaagcttcagaacctctgatcaaagcatgtatcatggtggtgacggaaggattgggattcggccgatcattccgaaacttttggaattgggtgaaaaaagaatcaaagatatggatgctgctggtgtagatacggccattttgtcagcatctctcggtgtggagcagttacctgcagaaatgggcattaaagaagctgaaaaaataaatgatgcattgggaagtgccattgctcagtattcagatcgatttaaaggctatgcggttttgaatgtaaagaatatacagtcggcggtgcgtgaattagaacgctgcagaaagaaatatggctttgtaggatggaatgcattttcaaattatggcagtcagaatctggatgatccagacatgtatgttttatttgaaacggtggttaatttaggaatgtttgtgtacatacatcctacagtacctgttgcggactgctttaaaggctggggtcctgctctggccacatctggattaggttttgcggaagatacggcagtggcacttacaagactgattttaagtggtatttttgatcgactgccagagttaaaaattgttatcgggcatagtggtgaagcttttccattccttattcaaagattagatgatgcttatcttcgctcaaaatggacgaatttagcaaaaaataaaaaaatgccaagtgaatattttggtaccaatatttggatgacaacgagtggtaatttttcggttcctgcatttcaatgtgcgtatgatacatttggaagtgaaagaattatgtttgggacagattatccgatggaagacatgattcgcagtgtcgaatttgttgacaaattacctatatcgattgttgatgctgaaaaagtttattataaaaatgctgagaaatattttggcttatagttcattttgaagggggtgtgaatatggagagtatcaaagggtttagtctggttaattggatttttgttatattaggtttaatctgtgcatttatatgtccggcgtttatacaaccgtggagtacattgacacctgcaggcgttacgattttctttgtatttgttggtacattgttgatggtaatcggcagtaatagtttgatttggccaatctttgcagcaatggcaggattagttgcttatggatgtacagacggtaatgcgattgcagcagcattatttagcaatgggacagttgttatgatgcttggtgtctttccgttgagttgggcattaaatgaaagtggatttggatatgtcgttgcccactttttattaacacggaaagtgcttaaaggaagaccggtattgtttacgatggttctgttctttgcgctccttgttatggcaatttttacaagtgtatttggcgcgttaatgttcggattgccattggttaaaacactttgtaaacaggcaggatacgatacagatagtcagtactacaagctgtgtcaggtgggaacctatatgtttgcaacaatgggttgtatgtttttcccatttacaaatggtatggtttttgcttcactgaattctattagtacagcatttggtgcagaagtttcaacagtggcttataccatctccgggttagttgttgatgtcgtatttattattatctatgttcttatgatgaaatttgtttttagagcagatatgagtaagatggcaaatattgacgcaggcaaattatcatccgaaggtgacaacaaggtaacaaaaaagcagttggttttagttatatcttttatcattgcagcactgtatagctttgtggtagcattacttcctgcaggcgcggcaatcacgatttttctaagtagatttggtggctctttgtggttttgtatgattgtggctattctttgtattgttcatatggatggcaaaccgatcatggatatcagacgggcactcaaagaaggtgtggattggaatacgctttttgcaattggcggctttatgatgcttggaaattatgtgtcaagtgaagattcaggtattatggggtggctgagtcaggtatttaaaccgattttgggtggtattgataatatctttgtattaatgttgattgtatgtttgattacaattattgtaagcaatttcttctcaaatatgatgacagtgattatctttggcagtgttgtaggtccttttgtagcgaattttacaaatattaatccggttgttattatgacggcgcttgtattttgtgcatggaatgcgtatttgacggttgcggcgaatggaactgcgccaatcttacttggatatgaaggcatcgacacaaagtttatttggacaaaaggaattatcataaccattgtttatgcagttgttgcagcgttgctgtttacgtgtatggcgatgattttgtagatatattaatattacttatataaacgcaaagcaatattaatgtagattaatagcctctcctgttgtaaaaaaaaacaactagtgttaaaatgcatgtaggtattgaacttacatgcattttatacattatggaatacaaggaggaatattcatgaaaatggtagcaatcagtcaggaactgtcatctacatcttatccgggcagaggtattatcattggtcgttctgccgatggaagcaaagcggttacagcttattttattatgggaagaagcgtcaacagccgaaatcgtgtttttgtagaagatggtgaaggtattcgtacagaagcttttgatccttccaaacttgaagacccaagcctgattatttatgcaccggtcagagtgcttggaaacaagacaattgtgacaaatggcgaccagacagataccatttatgaaggtatggatcgccagcttacattcgagcagtctctcagaagtcgtgaatttgagccggatgcaccgaactacacacctcgtatttctggtatcctgcatgtggagaatgcaaaattcaactatgccatgtctattttaaagagcaacaacggcaatccagattcctgcaatcgctatacatttgcatataacaacgtgcctgcaggtgaaggccattttattcatacttatatgggtgacggcaatccactgccaagttttgagggcgagccaacatgggtgaaagttgatactaacgacattgatgcctggacaaaagaaatctgggaaaacctcaatgaggacaataaggtttctctttttgttcgttttattgatattgcaactggtaaatacgagtcaagaatcatcaacaagaatcactaatcggaggtagatcagatgaaagaattagaattaaaatatggctgtaatccgaatcagaaaccatcccgtatttttatgaatgagggggaacttccgattactgttttaaacggacgtccgggatatatcaactttctggatgctttcaatggctggcagctggttagtgaattaaagagagccacaggtcttccggcagcaacatcttttaagcatgtttcgccagcaggcgcagcagtcggtctgcctttgacggatgtggagagaaaaatttactgggtggatgatatgggtgaactgacacctttggccaatgcttatgctcgtgcccgcggtgctgacagaatgtcatctttcggtgattttatttccctgtcggatgtgtgcgatgtggcaactgccaaattgattaagcgtgaagtctcagacggtgttattgcaccgggctatgaaccggaggcacttgaaatgctgaaagccaagaaaaagggcaattacaatgtcatccagattgacccgtcctatcgtccggcgccagttgaacataaagaagtattcggtattacttttgagcagggaagaaatgaactggttattgataaagagatgctgaacaatatcgttactgaaagtaaagaactgccggaatcagccaaaatcgatctggtgattgcacttattacactgaaatatacacagtccaattctgtatgttatgcgaagggcggacaggctatcggtatcggcgcaggtcagcagagccgtatccattgtacccgtctggcaggtcagaaggcagataactggttcctgcgtcagagtccaaaggtattgaatctgccgtttaaggagaaaatcggacgtgccgatagagacaatgccattgatctgtatatcggtgatgaatacatggacctgctggcagatggtgaatgggagagaacatttacagaaaagccggaagtatttacccgtgaagaaaagagagcatggcttgatcaacttcaggatgtggcacttggttcagatgctttcttcccattcggggataatatcgagagagcccataagagcggcgtgaaatatgtggctcagccgggcggttctgtcagagatgaccaggtcattgaaacttgcaataaatacggtatgaccatgtgctttacaggtatcagactgttccatcactagtacatcgtttcgtaaataactataccaatcgcgtaggattttgcatttcgtttgtacaagatcgaagggatacgttgaataggctgtatgcttatagaatacaatgaaagagactattgttgaaatgtgcagatacattttgatagtagtctttttttcgtgtggaaaacgtagcagcaggaattaacagaaagacgacaagataaaattaaaaaagaaggtgtaataaaattttaaaaagaaacaggggcgattgttgtcgaatagagtagattgattgtggggtgtgtcatattgtgaagggagatggcacattccgtcaatggatgatattttaccgggaaatgaggacatgttatacttcttttaacaattattgtaaatattgcttgaaccaatgaggggaaggcagaaagaggagaggtataatattggaagcaaatatgtgtaagttggaaaactttagaaaaaacgcggcatcacagagtattagctgcgaaattgttggtgggcatgttgtacagtcggagatgactggggaggatggacataagctgtgcttcctgctgggaacaatgctggaggattatttgtttaataggaagaaaacggatcaggtattattcggaccggtagattttcatttggatgagagcaatatttttcagccggatcttgcagttgtcgagcaaagtgagagttacagcggcggtatgattcgtacttctgaattgaacaagatcccgaaattgattgtggaagttctggcagatggcaatgcaatctatgattgtctggataaggctgtattatacggcaagaatggggtgagagagtattggctgatcgatctcaatgaagaatttgtttatacatattcctatagaaatggatttgaatatagaagatattcttttgagcagagcatgcggagtgtgtgttatccgggatttgaatgctgtatttccgatgttttgtgggatggcggaggaagcctgaaagagctggcgatgttttaccgtttcaagaaggaaatctatcctgagaatagtgtacaggttgtggctgagaacagcagtgtgtatggcggctatcaggagagacaatattcagcagaagctttctatgagtggatgaatacgaggaagaataaactgcagtatacgtcgttggtagaattgctgttgggtaatatcagggagtctgccatgccggcattcagacatcagaatgtgcgcggcaatttgtattttgcgataaagtcgtatttgaaaagggagaaacttccctatcagttgtgttttgctcctattttggtggagctgaagaaactggatctgctggattcggttgtgtcgccggatttgttcctcattagcagtggggaagtgatttatgataatatttacaggggagtgccgcagtggattattgagattgtaacgcctgcaacggccgcacaggattatatcgacaaagcccaattgtatcagtaccatggtgtgggtgagtattggattgtcaatgattggaagcagcaggtcatggtggttcgttatctgccatctgtgccagaaggggaggacaatatagaaacatcggtttatgatttccaggaaaagattccggtaggcacattgccgggacttgaattgacaatgagtgaagtgttgaaagaatttgattaggattgatggtatgaaagcaacattaaattttatatagggataacaaaacggttgggggaatgttcagaaagtcatcttccaaaatgtacatcattttggaagaatgactttaaaacaattcaagatcaatagagataatatagaaacaataatagagatagtttgttaacaacgataacagcatcggattttgaaggaaggaaaagaaattcaacaaattatcaaaaatattaaaaaaactgttgacaatttaaaataggagtggtatcataatcaagctgtcagcgagaacaacgcgaaacagcacagattccatcggatcagaaagaaatttggaaataaatgaaaaaagttgttgacaaacttcttccggtttgataaaatagacaagctgcttcaaacgagcagtaacgaactttgataattgaacaacaaaacaatcccgaaaattcctaaaaagattttctccttctgcaaaagctttaaaaagtaacaaaaatggtcaaaacgtagttgagtgaatcaggttccaaaactatacttaatccattataccataatgataatgatgaaaacaggtcatttgcctgttagaaacagtgtaagctaaagcattcttcatacagtccgttttagctgttttctccttctgcaaaagctttaaaaagtaacaaaaatggtcaaaacgtagttgagtgaatcaggttccaaaactatactaaattcccacacagaccatcatgaagaatccctgaaatgccagtgcgaacaagccttttaaatagttgtttccgatattgccccattccttattggtcatggtggcaaacggaattggtgctatggaagtataaaggtaaatctctatcattcttccgtataaaataacggttataatgatcgacagaatccgcatggtaatactgatcagcagcgtttccatggataacaagaacaaatcccccagttccatatcttccagtgcatccacaatccttgtgattgcttccgatgcgtccactgctgtgtttccggaaattactccggcggcattgttgaccacatgctggccaacgtcaaagaccgccatcgtgatattgaacgtattcgtcaccagataaatggctacatacgccttaaagatccagaggaaaatgttgtaagtctcaaattcatggaaattgtttttctgcgttaccatcgtaatcagttcatagcacaggacaaatgtgatgatcagtcccgcaatggggacaatcaccgtttgggaaatgttctggatcagattgaagattccggcattccatccctgcggtgtctgtcccacctgcccggctatggttcccacctgctcattgacagacgtgaacatgttatcaacagcagtgcctctggagccaatgtagtccttggagcgaagagcagttcaaactacatgaagtatgtattcacctatcagagcaatggctactataagatcaagaatgtcgcttccgggaagtatctgggagtgacaggtcagaaatcagcctcaggaagcaatgtggagcaggcctccggagggacaaggtggcaggtgatcccggatggaaagggaagttattatctggtacctgaatgctcgaatacggcagccgtggatctgacgaacggcaccgtggctaatggaacgaatatccggatctggaattataatctgactgaaggacagcgatggaagctggagagtacgacaacaagtacggtggctccgaagatcagcggacagacaaaaccgtctacgatgaaagcgggaagttccttcagcatccgcggaacgattacatccggccagaaactgacggaagtgacagtgggggtatatgatacatccggcagcatgaagataggaaagacagtgagaccgaacaccacaagctatgatctgagaaatgtggatacaagcattaagttcggaaacctggggacaggcgggtaccggtataaggtaacggcaaagacgagtgcaggtacaacaacgctcgtgaacagtaccttcatggtactgggaaacggaagaacggtggcgaacggaacatactatatagaaagtatgaagaacaacggatatggactgaacaccagcgggaacagcagtgcctctggagccaatgtagtccttggagcgaagagcagttcaaactacatgaagtatgtattcacctatcagaggcagatttctggccgctcactcccagatatcggcctgacgcagcatttttgatcttatagtagccgttgctctggtaggtgaatacatacttcatgtagtttgagctgctcttcgctccaaggactacatttgctccagaggcactgctgttcccgcttacattcagtccatatccgttgttcttcatactttctatatagtatgttccgtctgctaccgttcttccaatgtggatacaagcgttaagttcggaagcctggggacaggcgggtaccggtataaggtaacggcaaagacgagtgcagggacaacaacgctcgtgaacagtgccttcatggtactgggaagcggaagaacggtagcagacggaacatactatatagaaagtatgaagaacaacggatatggactgaatgtaagcggagtgtcatggataacagttacggaaagtttcgggaattgctggaatataagctgacatggagaggcaagaaattggtacgtgtagaccgtttttttccttccagtaaaaaatgctgtaaatgtggcagtgtaaagaaagaactgaaactttcggacagagtatacctttgtagatgtggaaatcggatagatcgggatctgaatgcggcaatcaatatacgtgaagaagcacgccgcatgttgttagcaggataaatgggaagtgtctgtatccagacaatgaaaatatcccataactgggtagcttccccttgccacacctgcctcgtccacaatctgactgacagtggtgtttttatacccctgctccaaaaagagacggacgcatacggtcagtattttcctctttgtttcgctgctgtctcttcgcaaatatgtcacctctcttcaattttgttagtatatatactaataatatcacagcaagtgcaaaaagacaatcggtatttgaaactttacctccgtaaattgtgacatttccgcaaacgctggcttcttccattactcacggaactttatgacttcttgaatactacccgcaaaggaaaagccgccgtctgttgacagcagcctttccgattgtttgttatgcgtaaatcaaatcgtttgaaacaacctccatagcagcattgtggatgttgttcatcttctgcacccacagcatttggttttccgctttgagtgcttccgttaaaccctccttttcggcaagttgttttaccagccgagagaacatttcctctgcctgctcgtttaggtcggcaaggtaatcgttcagcttgccacttatcagcagttcggaatagagtaccttgcggtgctgtttcagataccgcaagtgtcgctgtccccatacgccgatatgccttgattcttctttaggcagtttcaggcagggaagatagtaatcgccctgcaattcataccaaagtccgtttttctcgtcataaatgtacttatccattttgtaatcctccaattatgattaattttacctacaatccaatcattccggctgattacaaaagccaaagggagaggacttccttacgaagcctctcccttctaggatacctttttttgtataaacgagtcctgccggactcgaacgttcgaggtcttcgctccgcttcggtcggcgctcttctacctatgcatcgaatgtaagaacgatgttgccacagccttctgccaatttttcacacatcatatgcacatttttctgcaatggtatttcttttttgttctcatctaataaaataatgctctgttttgaacagtctgtaaaagctgaactgtcaacaaaatatctataccacctgccatatatagaatcagtcttcacatctatttgatgaaccagtgtaaatttctctccataagggctatgtggcacatatgtaattttggcatatttgacacgtgcatatggtgcaatttgtttttcccattgtttctgttcatcttctttatatttatcttccttatatttaccttcattttcaaatcccatgaccactacagcaataataattatcaccaatatccaccacatgattcatacctccttttatttttctaattcagcaatgcgtttgtcaatatccgcagatgctttgccaagttcttcatcagacatattctgtatcattctgatgatttctctcttcgtaaaaccagcaataaactcatgatcaagttcgtcgagtttgtcatgttcatcagactttttccagaataacttcttaaacttcattaatcccaacatatgctacctcttttctttctcacaattatttattgtttcttgatggttttattttatcaaacacatactattcacctgttcccagaatgcaaaaaaatcgagtaaagattttcgctccatctttacccgatttctttatacttatatccattttgatgctgcttctaagtcaatcacctttttattatgcgagaaaaagtgctttattatccataattcttttgcctgctgtacagcctaggcagtcgcagtattcgatgccttttgccagaagttcctcttcatgagcaagaattcattttcaacactaattgttatggaaaagttttttgttttgatacttcggttcgcacgttaaattaatacgaagtcttctgaaaatatctgtatctacagatgataaaataactgaacaatgtgcattgcaattctttaacatcggcagacaatccagtgctttctttgcattctcattggaggccgcactgacagaaagagcaaccaatacttcatctgtatgcagtctcggattatgattacccagataattcaccttcagttcctgaaccggacgaataacttctgatgccaataaatgttcatcatccgaaatatccgccagggctttcaatgcattcaaaagcattgcggatgccgcgccaagcagtgccttattcttgccggtaacaattcttccatccggaagttcaatggctgctgccggttcccctgtctcctcttctgttgtcttagccgcaacagcaacagcataatctgcagtggaaaggccttcctggttcagaagcatttccagcttgctgatctctgccttattctccttgcccttcttctgctcacaaagggcaatataataacggcggatcatctcttctctggcggctttcttcaccgcttcatcatcaaaaatacagttgccggccatatttacacccatgtctgtcggtgactgataaggcgatgttcctgaaatcgtcttaaatatcgtctgcagaacagggaaaatctcaacgtctctgttataattaatggcaaccttgccataggcttccaaatggaaaggatcaatcatattgacatcattcagatccgcagttgctgcttcataagcaagattcactggatgcttcagaggaatattccagattgggaaagtctcaaacttcgcataacctgctttaataccgcgctgatgctcatgatacagctgagacagacatgttgccatcttgccgcttcccggtcccggagctgtcacaacgatcagtgaacgctctgtcggaatataatcattcttgccgaagccatccgcactgacaatcagcggaatattcgccggataaccctcgatcatataatgcctgtatgcagccacaccaagatcacccagtcgcttaataaatccgtccgctgactgctgtccctgatactgtgtgatcacaacacttcccacataaagtcccacacttctgaaaaggtcgatgagtctcagtacttcctgatcataggtaataccgatatcgcctctcttcttgtgctgatcaatagcagatgcactgactgcaattacaatctctgcctggtcttttaacttcaaaagcatctgcagcttactgtccggctggaatcccggaagaactctggatgcatgataatcatcaaaaagcttaccgccaaattccatataaagcttgccgccgaactgagccattctctctctgatatgttctgactgcatattcaaatatttttcattatcgaatcctatctttcccatctttgtctccctttctttgacattcttattaatcgtaacaccttcatcgacttcatgcaacaaaaattatgatttatttttttcaactaatccttttctatttttacggatggacatattgatgaaaatactataaaatataaccgattgacaatgttaaacaatgcataaaatacaggaggacttacaatgggtaaagaagccaaaaccaatgctatgcgcattttggataagaataaaatcccttatgaaatgaacacatacacctgtgacgaatttattgacggctgccatattgccgatcagcttggtcagccttatgaacgcagcttcaagacactggtcactgtcggcaaaagcaagaactatttcgtatttgctatccctgttgataaggaactgaacttaaaagccgctgccaaagctgccggtgagaagaatgttgaactgatccatgtcaaagatatcaatgccatcaccggttatatccggggcggctgtacccccatcggcatgaagaagcagtttccgacatttatccatgaatcggccgccgattttgacacgattattatctccggcgggcgtctcggtgttcagctgattctctcacctcaggatctgatcaacgttacccggggacagtttgcggatattatcatgcactgattccgaatggagagttcatctgcctgcttataacaacagggacattctcatgacctgccatgaaaatgtccctgtattttattcatctgttattcaggattcaatgtcattacgccgtagcaaagacatagctgataaatgcatccatggcctctttttctgcaaagcgtgccagataaagtctgtctcccatcgctgatgccagaacttcaggaagctctgttgtcatcataatgtcatccttatacgcagccatcacttcttcatagctgtgcagataatgtttttcctttctgcatcctgccgaaacacaatagtatttatccggatactcttcctttgtcagccgatcaaaagcaaccatatccgcccaatctttgtagacatccgtactacaggcataattgatcatatccggtgtgaaaccgcctgatggcctgtaattcacttccagaccaataatctttcctttttttccaagatagtcatgatcttctgtcaatctgaaaaattcaaaatgaacaaaacggctctttacgccaaatgatttcacagctgctctgcctgctgcgcgaacatcatccgcaatatgtttttcaatatagaacacactgtcatcgtgattattgacactatccatgatagaaattggggtatgattgcctgtctcaaatatcggttctcccttactgttcatgatcgcatcataagagtaaatctctccgggcacaaactcttccataataaattgcacaccatgaaaatcttcttcatggaatgcccgcagctcatcctcactcttcagtttataagtcgttgtcgcaccgacgccattatccggcttcacgataaccggatatcccaccttctcaacaaaagcaagactttccgtcaaatccgtcaccagatgataccgggctgttggaatacctgcctttgcataataaggtttcattttagatttatacttcacatgttccatgtcagccgtcttcattcccggaatattaaaatctgttctcagtctggcatcctgctccagccagtattcattattgctttcaagaccatccattgacccatgcttataacacagaaaagccaccgcccgatacatctgatcatagtcttccatgctgtccaccttataatactctgtcaaagctgtcttcagggagtcagtcaggttctcatacggcgtgtcaccaatcccgaatacattcacgccattttcatgcagctggacacagaaattctcataatttgttggaaaatgtggcgaaataaaaataaaattacgcataatcataccctcttcttcatagtctcttgtttgactataaaacatcttccaacatctgtcaagtaccacattagcttgattcggatttaaaggattaaagtgcaaaatacgttaaaacatgctatactgacaacaatagacaaaatagcaatcaacaaaaggaggcgccgcaatgattgaattacatgttacttataccatgaagcccggcatccggccaaaagctttctacgatgcgttaaacgctgccactattcctgaaacctgccgacaagaaaaaggcaatatccgttatcattattttcttcctgttgacaacgataaccagctctttctgctggaaatatgggaagataaagacagtctgaaggctcatcagcagacaccgcattttaaggcgatgcctgccatcaaagatcagtttgttgaaaagacagattgtgttcgctatgacacgctctaattttcctctatacatctgagcctatactatcgccagatcggcaaaagcctaacatacggacagacactgtcagtctgcctgtatgttaggctttataatgatctcttaatcaacatgcacttctgccttatatccaataccgcgcaccgccttcagatcaaactccggatacttcctgaatttattccgcagccggttgacatgtacattcaatgttgactgtgacgtttctgtcgtcagtccccatatctcatccatcaactgggttctggtaaaaatcttatccggataagaaagcagtttgtataaaagccagaattcctttctaggcaaggtctgcctgtcccctttccttgttacggacagagaatcgcaatccaggatcacatcccctacctgaagcttcttatcataattcttgccagatctccgaagaaccgcacgaattctcagtacaagttcttcttcatccacattcttcgtcaaatattcatctgcaccagccatatagcttttcctgaggccatcccgctctttcttctccgccaaaagcatcaatggcatatctgaatacgtatcccgcagctgtcccatcagttcatatacattcagatccaccaggttatctccaagaataataaagtcaatgtacgatgtctccagcaccttcaaaacatcttcgccgccagaagcctgaagaacagaatagccttcccgcctcagcagttggtaaagtcgtcttctgtaagctctgtcgctatctgctatcaatatctgaaacattttgcctcctttacctgttctcgtcactttccgccagtgaaaaaagccttgccgttaagttctccaggatttccttctcactttgaagctgatgtgcatcattctcctgcatcttcatcggtttcatcttcacaacagacttcttcaactggttcatcgctgacttgatctgatgcttttcactgcgatccaactgcttgccagccttcttcaacgcctgctctgtcttggcgatcagcacttctgattctgagtggagttcataatagccttttctctcgccatcttcctgttcatacatctctgcctcacgaaccgcttgctgtatctcttcctctgaaagattcgaacgcgatgtgatcgtaatctgctgtgcttttcctgttcccatatccttggcagctaccgtcaaaataccgttgacatcaatatcaaaggtaacttcaatctgcggtacgccggccatagcccgcttgataccgctgagcttgaaattgccaagcagcgtattgtccttgacaaactggcgctcgccctgatacaccttgatatcaaccgatgtctggaagttcgctgctgttgtgaatatctgactgtgtctggccgggatggtcgtattccgttcgatcaaatgtgtcgcaatgcctcccaccgtttcaatggacagagataatggcgtcacatccatcaaaataatggaacttgccgcagaattctccggcagactgccgcttagcttgccggcctgaatagctgcccccatggcaacacattcatccggattgatacccttggatggttccatgccaagcatcctccgaaccttgtcctgaacagccggaatacgtgtcgatccgcctacaagcaataccttcgacagatctctggctgtaatccccgcatctctcaaagcattctgaacaggtcctgctgttctgtccaccagatcatgggtcaattcatcaaacttcgcccttgtcacagtcacttccatatgatgcggcatgtccttcaccattgtcaaaaaaggcagattcacggttgtcgatgtggatgatgacaattcaaccttcgccttctccgccccttcacgtactctctgaacggccgcctcatcatgactcagatcaatatggtcgctggctttaaactcggccagaagataatctgtcaggcggtcgtcaaaatcatccccgcccagatgattatctcccgaagtagacaatacttcgattagcccatcacctatctcaatcacggatacatcaaaggtaccgccgcccagatcataaaccagcaccttctgatcttctccgttattcagaccataggcaaaggcggccgctgtcggctcattgatgatccgcgttacattcaatcctgcaatccttcctgcatccttcgttgcctgccgttgtgcatcattaaaataagcaggcaccgtaatgaccgcatccgtcaccgtctcaccgagataatcctgtgcatccttcttgagttttctcaaaatcatggcagaaatctcctgcggagaataacgcttgccatctatatccgctctgtaattcgtccccatctgtcgtttaattgaagaaattgtccgttcagcatttgtcaccgcctggcgctttgcaggcgctcccaccaaacgttcacctttcttcgtaaacgcaacaatcgaaggggttgttctcaacccctccgcacttgttataatagcaggttctccgccttccagaacagccacacagctgttggtcgttccaagatcaatacctattgctctgctcatatctcaacctccgacatatatctcaacagtctctcatattgtactgttttattctatgtagaagtaatcatagcctagaattgttaacttaatataaactattgccatttcattgatatttaatacttttaataaacggcttatatttaaagagataattccttatttaaaatataacctgttgccacataacatgcacctgcaaataaaatatcaaatatagaaaaaacagccatcataccatttgcagatgccatgtctgtccagttcaaaatctgcacaacaacagcgcttactgcaatattcaacacgcaataaatgacaaaactgatcagtcccttgcagcgcatacctgaaaaaatcgtaatacataatgtgatagccagaaatgcggatgtcaccattccaacccagctgaatacaacctgtataatggaccacacaataagcatgccgtcaacattcacctgcaaagtaaaactgaataatgctttcatctgatcaaacaacgtctgcaactctccgtacttggcacataccatggtgatatctgcgaatccaataattccaaagataatcgctgctgctgcaatagagaaaaaacctgtcagaatcttgcttcccataatttcataaacattataaggtgtcatgaaaagcatatagccgctcttgtctcttaaatcatgataataagtaataatttcttccaaaccaacaataacaaaggtgaccgaggccagaaatgtcaacattccggcagcaatggccatgatttcttctttgcccaaaagcatacctgccagaaaagcaacctccagcagcgctaaaattgctccgataatcactttggatgttctctgtttgatgagttcatattttatcagctttaacataacattattcctcctgaattctaaccataaatctgacgatacagatccgtaacagattccccgcgttcctgtcgaatctcttctacatcacccattaatacaatctgtccgtctttcatgaaaatagccttatcaataatccgttccaattcctctaccagatgacttgaaataacaacagaagcattgtcgctcatattcgtcagaattgtgttgacaacttcatctctggccagaagatcgatcccgtttaacggctcatccagcagatacagctctgcctttcttgacaaagtcacagcaatcttcagcttcgccatcatacctgaggataaatttctcaccttcatattcatctccagatccatatctgcgatcagcttctcaaactgctgtgcatcaaaatcatcaaagaaatcctgataatatctgcccacatccttaatcttcatatagctgtaaaaataaccttccgtaggcatataggcaatatgcttcttcgtctcggcactaatcttcacaccatccagtgtcatctccccttcatccgggacaatcagaccggctgccatcttcatccatgtggacttgccgctgccattcggcccaagcaatccataaatatgtgcatcctctatagcaacggacattccattcaccgcaaacttaccgccataccgtttcacaacattcacacaatcaagcattataactcctcctttgcataccgctctctcagcagctgtatcatctcatccaaaccgataccgattgcctgcattccctgaagaaatgtatccaaacaatcctctgccatctctgactgtaacgtcttaatcattcctgaatcctccgtaataaatgtgcccatgccgcgcttcgtataacaaagccctctgctctccatctctttataaactctgctggctgtattcggattaatctgatactgcacagccatctctctgacagagggcagcttctcacctaatgccaattctccctggatcagccgcctgctgatatcctctatcacctgcagataaatcggacgatcattctcatatctcaatcaaatttctcctttccctgtctgtatcattaatcttttaaatgcacatcactgtactatcattatagtacactagtatcatatgtttgtcaactctttttataaaattattgtaaccttttcttttaatgtgaaaactcttaatgtgaaaagatccctgactgaatcgaattcaatcagagatcttcctgtctgtccattatttaaatgtttcaatatttaatcctgctctgagagcgatcatctcctctaagcgatgctctccctcttttttccacatagccataaaataaagttttgcctccggtctatgggtggccaatgtatgtattttcggatttttatactttctgaccatagatgatggaataacgacacatccttctccgctttccatgataaaactcatatccagtgtactttcacagaagcgaatggatggtgcgcatccgattgcccccagcattcggacaacctgggacatacctcgaaactctttatcaatgatgtataaaggtttctcagataatatctgctttatgccttcaatccctatggtctctaccggctcaccacgatagacaaaaaccatttcatcttcataaaggactctgtatttcagcgactcattcacatcttctttcgtccccataaatacacccatgttcaatgtttcttcactgatatcacgattaatgtccagatattcacccattttaaaaatggccctgagtgtaggcatctcctgtctgagctgatgaacagcttccgctactcccagatgaaaaatcggtgaatctcccaccctgctctcaacacctataaaaacattatgctcttccttcttttctatatccttggtattttttaaaaggatcggtatcgtatccatacgcatgagaatcaccttggcttcattcaaaaagactttgcccgccggtgtcagacgtacgctgcgcttgtctctttgaagaagcaccatgcccagttccctttccagatctgcaatctgtttactgagggcagactgggatataaaaagtgtttccgcagctctgctgaaattaagcgtatcagctactgccgcaaaatattttaactgccttatttccatttgtctgaccgcctttctgtttcactgcttcttattgaaggactttttctttcaacaccttcataatatgttcgacagtacctgccttgaaaggattgctcagatgcccctctttaagaagttcaaaataacctttgctgccgcctaaagaacaaagtctgaaatagtcctcccatgctgtctctctgtcatcaatagaacggatataatactcaagtgctcccatagatgcaagcgaatagtcaatataataaaacggacacataaaaatatgctgtttctgcatccagaaaccacctgcctcaagaaatggatccccgtcataatctctccatggcatatatttttcttccaatgcatgccagagttgatatctcttatctgtatctgtcatcttctgtgcatacacctcatgctgaaattcatccacacaggccatatacggaataactctaagcccttcctcaagatgcgtctttctatactggtcggccgaatctttgaaaaaataatccatccatggatatgtcagatactccatagacatcgaatgaatctccgctacttcagatgttgaaaaagcaatctcatccggcacaccgtttcttgtagccgtataggcctcaaaggcatgtcctgcttcgtgtgtcagaacatccacatctgcggaagttctgttaaaattggagaaaataaacggagccatcatatccggcagaaatgtacaatatcccccctgcattttacctggctttgtttcaagatcaaataattgatgctgaaccataaagtcaaagaactctcctgtttcctttgaaagttcatgatacattttctgcgctaattgcacttgttcctcagttgttccgtaaggtatggcattcccttcaggagaggacatatcttcatcataataatacagatgatcaattcccagacgatttctctgcttctcatatatttccgcaacaaccggaaccacaaactgcctgatcatctcacggtagcaagaaacatcttcacggtcataatcaaatcgctccatggaaagatacatcatctctgtataatccttaaatcccagtacttgtgcctgcttgatccggttgttgatcagctttgtataaatatcattcagatcatctgcaatagactgatacaaatcagaccatgccgtcaacgcagcttttctgatttttcgttccggatcctgcatttttttcaacagcccataaaaattaagtttttcgcctttaaactgtgcaaccggctttgcagcagttttgtgatagagctgtacaagattgctttcctcaacctgattttcgacattctccttgctgacaagtttcattaaacgttccatacgaataaaatacagctcaccatattcatcttttaatgcatccagatattctgactgcagaactgttttctgaaattcctgcatttcaagatcaacaagcggcatattttcataaaagcattgcatttcagattcataaaagggatctgttgtatcaatagtattgcgaatttcagccaccgtcgccatcgttctcaaatgtctttgctgatcattcactgctttaaatactttacttactgcttcttttgtcccggcatttttgattttgtcaacagattttctgatcaattctttggcgttttcaaaatccggccgaacatattcatattgtgagaatgttgtaaaatgattcataatctgaaacctctctattcgttttgtatcggtgcattcagatacctcatgccttctgttgttcatatagaaattattagacctaagtgtgcgcctgacgcgcactttcgcgcgttcccggatagcacagctatatattcctctccgcgaactgcgctttctggcacgcagtgcctttatatgtaataggaaattctgttggaatttcctattacataaaaaagcatctgaaattcctcagatgctttagcaggggtaccaggattcgaacccggaccagcggttttggagaccgatactctaccattaaactatacccctatataactatttaaatttttaataccatgcaccttcaaaactgcatatcataaaacactctgccttttagaaccattttggtcaagccctcgaccgattagtaacagtcagctacggacattactgcccttccacctctgccctatctacctcgtcgtcttcaaggggtcttacttctttcgaatgagagatctcttgttgtcgtgctctccagcttccatcgctgtccttcagtcagattataattccagatccggatattcgttccgttggccacggtgccgttcgtcagatccacggctgccgtattcgagcattcaggtacaagataatagcttccctttccatccgggatcacctgccaccttgttcctccggaggcctgctccacattgcttcctgaggcagatttctggccgctcactcccagatatcggcctgacgcagcatttttgatcttatagtagccgttgctctggtagagacacccgttcccatcccgaacacgacggttaagacttaagcggccgatggtactttgctggagacggcacgggagagtaggtggctgccagtttttaatgaaaaaatagttcttctatatgaagggtttatatataagagtgatatatcaagtttatatcaccggttaaaaataacagtcttttgactgattcatatagacggcctatatggctacatattatgggcttatagctcagccggttagagcgcacgcctgataagcgtgaggtcggtggttcgagtccacttaagcccataaacacctaacattaaaatattgagatattgttcagaagggaacgataacaggttcgaatcctgggatatcatttgctgataagcattcgatttatcagcaggttgtaccttgaaaactgcatatcagaaacacatcaagccgtaaatcatcgaaaagaaaagatttacagatttcaaaagaaatatgaaagtggaaagctgatcaggaagaaatatcttaccttatcattcccttacagcaacgatggatacagtcaggtatttggcggtgaaacggctgagtgcgtctgtcaggggctggttgatatctttgagttcattggaggtgtacctccactgcttatctttgataatgctactggtgttggacgcaggatcggtgatgtgatccacgaagcagaacttttttcccgttttcgtgcccattaccacttccgtgtccggttctgtaacccttactccggatgggaaaagggaaatgtggaacgcaaggtggattataacagggcaaacctctttgtgcctgttccgcatttttcagatgttgtccagtataatcataagctgcttttaaagcacgagcggaaagcttctgagcttcactataaaaaacaggttccgatctgtgaactctttgaggaagaccgcaaagcgttgctgatgctgccacctaaaccttttaatgtatgcagatatgaatggctgaaggcagatggttatggaaaagtctgcatggatggaaaacatttttattcaacaagacctgaaaatgccaatcaaaaggtactggttggaattcatgcccacacagtcgatatccttaccgaaggaggacaggtcattaccacacataaacgtgtatttggcgacaacaggagcgatgtcagtgattatacgactactcttgctgtccttatgaaaaactctggagcatggggaaacagtggactcagacaggaaaccccggatgccctgcgtacatacatggatgcacagccgaaagagaaacttaaggactgcctgaggatcatgaacgaacttacaaatcagtatggctttcaggctgctgcttctgcaatggaaatggcatgtgccagtatgaaagtggaaagctgatcaggaagaaatatcttaccttatcattcccttacagcaacgatggatacagtcaggtattcggcggtgaaacggctgagtgcgtctgccaggggttggttgatatttttgagttcattggaggtgtacctccaatgctgatctttgataatgttactggtgttggacgcaggatcggtgatgtgatccacgaagcagaacttttttcccgttttcgtgcccattaccacttccgtgtccggttctgtaacccttactccggatgggaaaagggaaatgtggaacgcaaggtggattataacagggcaaacctctttgtgcctgttccgcacttttcagatgttgtccagtataatcataagctgcttttaaagcatgagcggaaagcttctgagcttcactataaaaaacaggtttcaatctgtgaactctttgaggaagaccgcaaagcgttgctgatgctgccacctaaaccttttaatgtatgcagatatgaatggctgaaggcagatggttatggaaaagtctgcatggatggaaaacatttttattcaacaagacctgaaaatgccaatcaaaaggtactggttggaattcatgcccacacagtcgatatccttaccgaaggaggacaggtcattaccacacataaacgtgtatttggcgacaacaggagcgatgtcagtgattatacgacgactcttgctgtccttatgaaaaactccggagcatggggaaacggtggactcagacaggaaaccccggatgccctgcgtacatacatggatgcacagccgaaagagaaacttaaggattgcctgaggatcatgaacgaacttacaaatcagtatggctttcaggctgctgcttctgcaatggaaatggcatgtgccagaaccaggccctgctctgcttagcttccgagatcagacgagatcgggcggaaccagagaggtatggccgtaagctgctttttatctttttcctaatcctttataatgcgtcaatgaattatgacacgcctgccgttggcatctttgtgtgggttaaataagggtatgcaaagaaggctgtgacatcccatgccgaaaattggatggactagagaagacccgcccaggggtcccagccaatcggtgaatggccattgcagtccccgccacctcaaatggcctgacgatggtatggacgtaagccacctttcatcttcttcctattgcatctcttctacaatgtgaaatactttttacaattgtgtaggtgtacaatctgcggcgctgggcggctttcggagagagaagtgaaaaagcttacggcacctgggattcccaggcggtcttccatccaggtactaaccaggctgctctgcttagcttccgagatcagacgagatcgggcggaaccagagaggtatggccgtaagctgcttttcatctttttcctaatcctttaaaacgtgtcaaagataatcagaagtttctttttctaaaattgaagcagttcttagcattggcaagagaggttcctaaagcctgaaggtaactttacttttcttcactggcaattctaacatgttgggttagcacctgtatttcaacggctaaattacaaacaaaagtatgccaattgttaaatgttgatcaacactaatttagcaaccatgaaacggaatcatatcatatcccattatcacaacctttaacggaaggagtcaacatgatgtgtaatttaggtgaaggcattgaagaaagaaccgccgcaagagttactaaagaagttactaaagaactaaacgctaaacatgccaaagaacttacagaaaagctggccgagaaagaccgtatcatctcagcttaccaattattagcaaggcatacacctatcgcacagattgccgctgagaccggacttactgaagaagccatccgcgcactctaaagcaaatcctaaatcgtcaacaaaaaacgtcaatccagcatttacgtctgcattggcgttttttacataaacagatatttgaactaatcatacaacagtgaacattattttatatgtcatatattactgtcgaattgtcccaatccgtcgataattgatatttgttcttgtctccttggtgatttaaaataaaaacagtcaacgttgatctgatgaacattgtgtattttttattgcttacagctactctcttgagtataataaaaggggaatcgacgatatatgaacacagccattacaaatagaatcactgcctccaacgataaggcacagtatgacgaatacgccaagcagctgatcgcacagaagcagatacttgcctatatactggtacagacgattgatgaatttaaaggcatgcagccggaagacattatctcacgcatcgaaggagaaccattgatcggtgttgttccggttgaacccggtatgacaaataccagctacacccattcatccggagaccagctcattggcctcaacactgagaacagcgagatcaatgaaggtatgatccgctttgacatcatcttttacgtccgcatgaaggatggccttgcacaggttatcatcaacatcgaaattcagaaagacgagcccacccagtactttcttctgaacagggcgatcttctatgtcagccgcatggtctcctcacaaaaagggagagatttcgtccatcagaattacaatgatatgaagcgtgtattcagtatctggctctgtctgaacatggatagccacagcatgtgccatatccatctgaccagggatgatctcattaatcatcataactggaaaggaaatctggatttactaaatattatctttctgggcatcggtgaagacctgccgccacaggaagagcaataccagttacatcgcttgattgctgcacttttatccaaccaattacctgcagcagaaaagcttaaaatcatccataacgaatatcatatcccattatcacaacctttaacggaaggagtcaacatgatgtgtaatttaggtgaaggcattgaagaaagaacggcagtgattctatttgtaatggctgtgttcatatatcgtcgattccccttttattatactcaagagagtagctgtaagcaataaaaaatacacaatgttcatcagatcaacgttgactgtttttattttaaatcaccaaggagacaagaacaaatatcaatcgttttactttggtttgtgttcttaaaaattctttttaggaattttcgggattgttttgttgttcaattatcaaagttcacgtaccgctctctgagcgactcgtctagtttatcaaatctcttgaagtttgtcaacaacttttttcatttattttcaaatttctttttgatctgatgaaaaacttactgttttgcgtttgtctcgctgacagcttgtatatgatatcatcttagatttgaattgtcaacagtttttttaatttatttttattttatatgcgttttttgttacctactctattgcaaagttaaattccacccctctgtggaatttaatcctgcaaatcaccctgctttcaaatgtggaatttaatcatcaagccactcctggataacaggcttaaaaggatccagcttggatggttgcgtctggacaaccggcggtaccggagagaagtcctcctgagaaagatatttgcggattgttttaggatcagcaccagttttctttgaaatttcactgattcggtatccacaattacttaaatctttgatatgattgatctgggacatagtgtacatcttcctttcctcctttgaatagattggtctctacacaaaggatatctgtattgtgaaggggatacaatatgtcccgccttttttgaggaaaatcccttgccgatttcagggatttttaacgcttttttctggtaattttagtgtatcataaacaaccttgaatgaaaaactaaaacccaactgaaaatacgtctaataatcaaaattctgttctgaggtcaaataaagccctaataatggatgttcaaattcaaatatcatgctataattaaggcattccagatagcaggtatatatttgtttgcatgattaacagacggctggctacttgttatgcaaaagtaaatgcgacccgtctatttaatacctattgacaaatcgattactatctgcagcttcggtctaattactttttaacgaataaatctggcattaaatgcacttcatctggcgggatgaggtgcatttttaataatgacattaatgctttgaaatcttcatcatcctcttctacgagctcgtatggacttttatttccaagtccaggacgttttacactattgatatgattcattaataaagtcatatcttcttgcgtgtatgggtttaagctttttccttttggcacggcataacgaataaattcatgattcttctcgatacaccctttttgccatgaagccattggatcacagtaataaaggcttgttctataaactaggaagccatcctcatccagcgtaagttctaactcatctaccttcttgaattcgctgccgttgtcagtcaatataaccggaaacaaccgtctaaaaacatctattcccaatcctgtctcgagatagtccagaaccctttttacggattctgcttttccatctggcatcaggaatagtagcattacgttgttctttctaaagatcattgtaagcaaacgctttccagattctctaacgccttttacagtatccatttctgttacttcatcttctgaatatttgaatttcatcgcatactcaaaatcctcatatgtcctacactgtctatactccattgagtgaaatccattgatatcgttgtactttttctttcgtggtttgtagcctgtctttcttcttaaatctatgtttttaatagataaggcaccttcatcgatatagttataaagtgttctcaaacacactggcatttcattttcatgttctgcatatatgtgtgttaaaggctggcctttcttaacaagtcgagtcacaagttcatccaattcttccttcttttcatcagaaagtctaactccttgtcgactctccgatctacgacgagttacagctacatcagcgaatttcgcactgtaaatatacttatctttgttgcaaagctttttatccttgcagttattacaaacatacggaggcgaatcaaacttatggcaagcaactgatacatatctatcgcataccttggtacaatccactcctctgcaaagtctacactttgtattacaggcttcttcatcacagccgcacaaattccttactgtgcattgtcttgccatgcggcaatcttttccattcgggtaattacctttaatgaaggttctgttttctttaacttcatgtgcaatagtagatggatgtctgcgaagtctttttgctatttttttgaatgactccccgatgcatatcccagtttctattgctattcgatctgacaggtccatttgtccgctagcattgtaataattcatatctgctcctttcccagcagatagtaatcgatataaccaatatatcatgccttggaaagggctgtagaaaaagtaaactagaccttttatagccattttcagttgtcaaagtacaggtttaatttttcattttaggtcttttatatctatattttataacatcaggtggggtataaaaatttttctattttgtatggaatttacccctgcaaagtagaatttacttctgcaaagtagaagttacttttgcaactcaccaacattttattgctgcttataaagctcatcccagtacatcttatcattcaatgtatgatactgtaccggaatgtgaagatacaatatgaatatcacccccattatcttagtatgtatcacctacctgtcgcattttgaaagtcttagtattttagttattttgcaattactcaatgcaccttattgttttggaagctgacactcattaatagcaatcccagttatacataacatggctgaaatctctgttcttcagtgcttctctgtcaataaagaaatttgcgacaccggcatctccccacataatatccttcacactgttcaactgaaataataatatctcaccatcgtcgacacttctgggatcagattgtgtaaaaaaaggataaccaccaacctgacacatatattcctcatacatatcacacaagccatccataacatcgtcattctcaagatatccccgcagctccctatccagacaagtatctgcggccggccagaaattcacatcgtcaaaaggcatcgtctgaacaattttagtaggtttcaaacggtatgttaccgctctctccataggaagcgctgtatcttcatgccagtcaggttcatgaatacatgctttctccgcccgctctggcaatgtttcatagtaacgtatgcaccaccctgtctggtcatagccatcatcaaaattgcatccatacatatcttcgctgctgatcaatatctgcatcaccccctgttcaggataatccggcaaatgcggaatctgggcaaaattcacctgcgccagcagatacaattcctcgcctgttctgctgttctccaatcgatgttctccctcaggcacataataagcgccgccaatcttacagtcaaaaagacctgcatccccttcttcgagttcaaaactcaccatcggggctgctgtatattccgtcattttccggtaaattttctctacaatctcagttgtattctctcgctcctgcgctttcttttgacccgctcttgacgctgcacaattatcatcagctttctccgccccaccaaatgcaaatgaaagattttgataataattcagattttcaagcttcttcaaattctcttttatccatgaacatccacccgttgatttcatgatcttcatggatatattcatctttttcgttaaaatatctattgtattctcaaaaagcaaactctttttcaccttgagcgacaacacatctccccatggaagaagagccccctcatcaatcgtccaatcaggccggagtgcaaatatagctatccccttctcataaaaaccatataaaaaataatgtccgtttgcatgtaccggcagtacattctcctcatatgcaaaattatactttttcagttctctttttatttgttccaaattcaacatcatatactccccgctctccgtatagactaaaaaccttaccgatcgtcagttattctcctgaaaattagtaaggttttatctgtcgcaaatattctaaaatataactgatcgcatctattgtctcttctgagcaaactcccgcataatatcctgcatcatcgtgttcagtaattcaatcacctgatccgcattcatcatatcattaatcgtaatctgcccgacaatatgactgttgcgtcggccgccgtcaagaaaatatccatttagggctctgtaatcccgtgcgttctctccgtctttcagcagtacatatcccgcaactgccgttatgctgtaactattctccgtgacaccctcaatgaaatccacataaaatgccttctgtttctcattgatataggtgtacatgcgcttataaacattggacacttccagaaaactggatggttctacacgtctgtaatacgggtattcgcctctccacttatgtctgcagaaatactcattcagcgcccgccgtacggcaccatgatgcttacggcatgataatggcagcactcttttctcgtaatattggctgcaagtgtccagtatatctgtcaaaacgccgtataatgtttctgctttcttcatggaagcaaactgtatccaataacggcagaaagctgcccgctcatcaatagccttatgcagccatcccgtcagttcctccaaaccataaggggtcagatattcacatgctgcctccagatcattctgactgaatgcaaaattctccgctgcatcttcatcaaaacggatcaggctcttccctatacccgcttctgtcgttggtgccaggtagaattgtatcagctcgtaaaacacacacagcagcggaagggcacgcagctcatccttgtcaagcgactcaacgccaagtatctgtgccttctcaagcattgccttcaaaggatgcatcaggatcctccatggcaatttatccgcatcgacatccaacggctccatcgccgaatcataattatataaatgcagtgaacctttcagacttctaaagacaaaagaactctccttcgcctgataaggtccctctgaaagaccattgacaaatgacagacgataatacggtacactgaccttttcttctgcaccattctcgcctttcacagtctccgttcgttcaaaacattcaccggaaagatgtgtaatgagaatttctcgcggatgtctgccgtcttcaatcaatacatctgcaaaatccagttccagagacatcgcaggtgtactcaatacatccacatgcaatattctgttcttaatcttgtacggaatcttcttctgtccaacaacatactctgacaggccatttaatgcctgctgctcctcaccgtcgaacatccgtacaaactctttgtattccgcctgttcttttcttaatgctgctttcgcagtcaaatagccgtgtacaataccgttttcaacgctttccaattcttcttcagtttcaaactgtacaagtccctgaagcgtcttgatcgtactctcttccaaatcgtagccttcaatcagcgaaagataatgctcaccaagttcatggagctgtgcatattcagcccccttcatctggcgataatcccggtaaagatcagacatcagctcattatcaacactataatgtagcatcattctcctccttgccgctgttcaaatactgccacagcgctgccaccggcagtcctacgacattattgtaatctccatgaatagaccgaataaagacagctgctcttccctgaatgccataagcgcctgccttatctgccggttcacctgttctgatataatcccagatcatcttatccgtcatcggatacattgtgacttccgtcttctccgcaaatactgtttctttccttacatctgcactgccttcaatcactgtaacacctgtatacacctcatgggttcgtccctgcagcatatgaagcatcctgaaagcatcctgatcattcgccggcttcccgagtatctcctgatcacatgatacaacagtatccgctccaacgataatgcagtcttccgcataacgttcagccacatcctgcgccttttgtcttgaaagccgtctgaccatttcttcaggttcccacggccctttcttctcttcctttgtactgacacatacatcaaagtccagaccggcctgtttcatcaactcactgcgtcttggcgatgcagatgccagaatgatttttctcatgttgctaaagcctccctgctgcaatacttaaatcacaagtattatactttatcttcccggatttgtaaacatctccggcatatacttccagtaacgcttcggcaacatctgcatctgcagtttcggatttcttctctccagaatagccacactctccgtaaacgtcttccaccattctgtaaaagcatattccgatgaagacaacatcatctgcggatcctgtctaaagtccggatgacggatataaagccagtcttcacctgctctgtgaatccagacttcatcccgttccacatcatggatcacccaatgctccatgggcagcctgtcctgaaaatattccgctagaaacattcccacatgatgcttcgaaaccagtctggcatacagaatgtcgttctgaagttcctgaaatctcagaaaaccatataaatgctgtgtctccctcgagacacttcttgacagctgatgcagtcccatcacttccggtatggacatcgcattcaaaaccttcctgccattggcaaaggccaaaataagaaatctgtagataatctctcccttctcctgactgtccgcctccgacgccatgtgtaccagataccatgcctcctccgaaatcttgcttataatggccttcacaaccttcccggccttctctgtattcacttctaccgaataaatatccgaaaacagatcaccgttcacataagggcccaccgccagcttctgccaggcatggccataccggcttgtgaaagcttcgtacacgccgcacaaaataccttctgtactgttctgacacatcagaatacgcattctcttattctgttccattccaagtcactccctatcaaagctgtccggtcaatacctgccgcttatcctcctgctccaccggcatctgcaagtgaaaatcatcaaacagattcaactgtctgaatgtatccccggagcgaacaacattctccggcagacgctcctttaatccaagaagattcgttgtaatgaaccgttcatccattctgaaaggcatataaactcttccctgacaagtaataaagtacatcgcccgcttcagtacaacccccatcttcttcagatcctcgaatcgcaggccgccatacctcctggcacgacagatcctcctggcgctgttcacaccaagccccggcactctcagcagctgataataatccgccgtcatcacctccacaggaaaagcctccaaatgtctgaccgcccaatcgcactttggatctagcagcagattgaaattcggctgtctcttactcagaagttctgctgccttaaaaccataaaaccgtatcagccagtctgcctgatacagacgatgttccctcaaaagcggcggcatcgtccccaccgccggtaatcgactatcctcattcacacccacatacgcggaatagaaaacccgtttcatcttaaatctgccataaagcgcctctgatacactcataatctgataatccgactcccctgttgctcctataatcatctgggtactctgtcctgccggcacaaagggctgtgcatgccggtacagcgccacttcgtgcttcgaaacagtaatctgctgttgaatctgccgcataggcttcaaaagctgtctgcggggcttattcggagccaggctccgcagcccctctgctgtcggcagttccagattgcaactcatcctgtccaccagaaaaccggtctgctggatgagttgaggatcagctcccggaatcgctttcacatggatatagccatgaaaatgatacactgtgcgcagccgcagaactgtctcatagatcagctccatcgtataagacggattcctgtaaacggccgaactgaggaacagaccttctatatagtttctacgataaaaacccatggtcaatgtacatacctcgtccgggctgaatgtcgcccgctctgtatcattaccgactctgttgacacaataaacacagtcatagcagcagtcattagtcaacaggatcttcagcagagaaatgcatcttccgtctgcagaaaaactatgacagataccacaggccactgcattgcctgttcccatgctgccattcttcctgtccacgccggaagaagtgcaggccgcatcgtacttggctgcatcagccaaaatacgcagtttctcattcagatgactgtcccatatcgtctccatgtcctaccgccctttcaaaaaaacatatgttcctattcattttagcacatacgttcgtatttgtaaacatatgttttcgaaaatatgtttggatttattttcctgagtgctttcttttacttcaatcgcctgactctgaatgtatggcatgtctttatatgctatataaaaataaagtaactgttcagagacaacctccaaaatgctacgcatttcgtcggtgtggcgtatccaccaaataaaatttcaaaaacattcttaaaaatgcaagcattttatacctgttttttgaaattttgcttgtctctgaacagttacaaaataaaaaagaaccgaaacacttctgtccttaacgcagaattctgtttcagttctttttttgaagactcccctgagcatcctttatacaccttcatcagatatgatgttctttaaaataggccatggccttttcctgatccttcatgacctgtgccttcacttcttccagactggcaaatttgtgttcatcccgcagtctctgataaatgcgcacagtgatcatccgatcatataaatcacctgaaaactcaacaacatgggtttctatacgaagttcattatgatctccaactgtcggattgcggccgatattcgtcagcgcatagtactttccttccataccttcaatctgaacaaccgatgcatatacaccttccggcggcagcagtttaatgtcatctggcgccagattggctgtccgcatatcaacttttcttccattggcttttcccggaataacttttccattaatctcatacggacgtccgagaagttctgtgaccgtctccattctgccctctgcaatatagcctctaatcattgttgagctgatctcttcgccgtgtacacacagtttttcacagttatcaacaacataaccatacgctgccgcatgctttttcaaaaacgagacatcaccacttctctggtatccaaaatggaaatcatctccaacgacaatcacctttgcaccgatatctctcacaagtacatcccgcacaaaatcttcaggcatcatatgcgctgtctcctgggtaaagggatactcgatcaatacatcgatccccatttcttccacaatgcgaagccgctcttcttttgtataaatcagcgactgtttctttccggtcagcagactcatcggatgaaagtcaaaagtaaagacaacggtctgaaaaccctttttgccatattcttttaatttgttgatcaaaagctgatgtccccgatgcagtccgtcgaattttccaagggcaaccacggtgtgatcaagatggatatcctttgttcctctaaaataaatcatgaccaatgctacctctatacaaacatttttatattttttaagctgtttttgacggccacatactgataaatcgccgtaaaattacctgtactgctgtacatgcgtacctgcattccgtctttgagtacagcggacgcatcaccgccggaggttgcaacctgttcccttggcagccagttgccgttggcaagcattttatccgaaaatgcatctgtcgttttgaattccggataatccgaaagcatttcttcgacaggcacaatatgtctgagcacttcttcttcaccgcaggcagccatttcctgaatctgagcaagtgtccatgcatgtgcaatatcaaatgcccccacttttaaacggacaagttccgtcatgcaggcaccacagcccagtttctcgccaatatcctgacacagtgtacgaatatacgtgcctttggaacatgagacctccattgtgacataaggcagctgtatttctgtgatattcagggcattaatcaccacatgtctggcctttcgttcaacttcctgaccggccctggccagctcatataactttttgccatctaccttaatagcagaatacatcggcggtatctgcatataatcaccaacaaaagaaaccgctgcatctctgacctcacgctcatcgacattcacagccttttcagtaagaatctgtccggaaatatcctgtgtatcggtagttctgccaagcatcatcaccgcgcgataagtcttgtccctgtctgtgatcatatcacagagctttgttcctttgccgagacagaccggcagaacccctgttgcatccggatccagcgtacccgtatggccgattttcttctgatgaaggattcccctgagttttgctacaacatcatgggatgtaaaacctttttccttacagacattaatcattccatcgtacatgtatccagctgctcctttattaatgcttctgctgtatgataaatttcattgatatcgcccactgctgaaaatcccgctgcgcgcacatggccgccgccgccaaatttgcctgcaaccgctgcaacatccacgaaatgattggatctcatactgaatttataagtgtttgcctctgtgtcggaggcagatgcaagcaatgccacctcaatgttccttgtcagacgcagctgatcgataataccttccagatcaccatgtcctgcacccaaacggtccagctccggtttttcaagcacacacacgatcattcgattgtcaagaacaggtcgacatttctgcagggcatagcccagaatcttattctgcttataacttttgcggtaaaaaacatcatcaatgaggtctgaatacggaatgcctttttccatcaggcagccggccatatccattgtatgacggcttgtattgctgtatttgaacacaccggtgtcacaaataataccaatatacaatgccactgctgcatcataagaaatagcctccattgccatcagccctgtcagtacttcgcaggttgaactggcatccgacacgatcatattctcatcggcatagcccggattgctgatatgatggtcaatacagatcctgtgttttgccgtatcaaaatatttctgcgctccggcaagacgccctttgtcactggcatccagtgcaataaataaatcatagaccttatcatcttcatagctgccaataatctgctcaacaccggcaatcactttatagctttccggaaccggttccagtctgacatctgcctcaatctcaggataattatccctgagataatgccagaggcccatacaggcgccgacgcagtcaccatccggtcttgtatgaccggcaataatgactgttcggaccccttccaggcaggacagaatattattcattgtcctcttctccttcatgttcttttccttcatctgaacgaacaacatcgtcaatcagttttgacatattgacgccgtattcgatcgactgatccaaaacaaaatgaatttcaggtgtatttcttaagttcacagtccgtgcaagctcacggcggataaaaccaatggcacttttaagtcctgccagtgttgcatcctgtgcatctttatcgcccagcacgctgatataagctttgcactgtttcagatccggtgctacttccacagcaacaacgctggtcatcggactgatgcgcggatctttaatctcacgggagataatacggctcagttccttctgaacctcaccattgatacgcgtattctttatactgttctttctcatctatatactcctatctcggcacttcttccataacgaaagcttcaatctggtcgccttccttaatatcgttatatttctcaaaggacataccgcattcatagccggaattaacttctttcacatcatctttgaaacgcttcagagatgcaagctcaccttcatgaataacaacattatctcttaagagacgtaccttgcagttacgaacgatcttaccatcctgaacataaccgccgatgatggtgccgacaccggataccttatatgtctgacgcacttctgcatggccgatgatcttctcttcgaatgtcggttcaagcatacccttcatagcagcttcgatatcttcaatggcattgtagatgactctgtacagacgcagatcgactttttcctgttctgcaataatcttcgcctgattgtccggacgaacattgaaaccaataataatcgcattggatgcagaagccaatgtaacatcagattcattgatggcaccaacaccgccgtgaataaccttgacagccacttcatcattggaaagttttgcaagactctgtttcacagcttctacagaaccctgaacatcggctttgacaatgatattcagatctttgatctgacctgcctggatctgatcaaacagaccatccagagataatttggattttgtatcagccagcatcttctcacgttttgtggcgataaatgtctcagccattgtacgggcttctttttcagtatctgttgcaatgaagacttcaccagcctgaggcacttcattcaaaccaagaatctctacaggtgtagacggaccggctttctttacacggcgccccttatcatcaatcattgctctgatcttaccaaatgcagtaccaacagttacattatcaccaacattcagtgtacctttctgaaccagcacggttgccacaggaccacggcccttatccagctgtgcttcaagaatcaggcctcgaccctttctattagggttcgcctttaattctttcacttcagcatccagaaggatcatatccagcagatcctgaaggccttcacctgtatgtgcggaaacaggtaccataatggttgtaccgccccagtcctctgcgatcagaccatattctgtcagttcctgtttaacacggtcaatattggcactcggcttatcaatcttgttgattgcaacaataatatcgatttctgctgctttggcatggttaatggcttcaattgtctgaggcataacaccatcatcagctgcaacaacaaggattgcgatatctgtagactgtgcacctcttaaacgcatggctgtgaaagcttcatgtccaggtgtatccaggaatgtgatcttctgaccactgacttcaacaacataggcaccaatgtgctgtgtaataccgccggcttctccagatgtaacacttgtcttacggatagcgtcaaggatagatgtcttaccatggtcaacgtgacccataacgcagacaaccggtggtcttggctgaagatcttcttcattttcttcctcttccttcagcatctcttcgataacatccacaacaacttcatgttcacagagaatatcatattcaagtgcgatttcttctgcctcatcatatgtgatgtctgagttcacattaagcatcttaccttcaaggaaaagcttcttgatgatctgagctgccggaatcttcatcttatctgccagttctttgattgttactgtctcaggcagttcaatgcttgttaccttctctacaaccggttccggctttggctgtgcattgacaggcttcttacgcattgtatttttattgctattgttattgttgttcttattattgttcttgccgtttctggatgtatttcttccttcaaaatctctatcatcacggcggttgtcacgatctttgttgtccttatagtttctgcggttttctcttgttgtatcctttgtcataacaacttctttattgatggcactgtcaagattgaacttgccgtcacggccgccgtttctaccaccctgacctctgttgtcacggctgccgtttctgttctggccattgccgtcgcgattgaagcttctgttctggccgttgccgtcgcggttaaagcttctgttctggccgttgccgtcgcggttaaagcttctgttctgaccgttgccatcgcggttaaagcttctgttctgaccgttgccatcgcggttaaagcttctgttctggccgttgccgtcgcggttaaagcttctgttctgaccgtcacgaccgccgtttctattctgaccatcgcggttataacctctgttctggccgtcgcggctgccattgtctcttgatggtgtgctgtaattaccgcggctgtccataccaccctggacattgttattgcggcgtggtgctgcgtttctattgtcctgagccggccttgtttcctgcttctgagccggtttggctgccgactgtgtaaagaactttctaatcttatctgcattctctgatgaaatggtgctcatatggctctctacatccacaccatgtccctttaatgcatagatgacatctttgctgcttttatttaattcctttgccaattcatgtactctgatttttgacataggctacctccgttaaaatggcggaatcactgattgattcctgtatcaataagtttcctgatggactttccgaaaccggcatcaagtactgccagtgaagccctgtatccacgtcccgtatgtgttccgagactttcttttgttccataaatgtatacaggcacatgataataagcacccatatcattaaatgatttcttcgtattgtcagatgcatccgatgcaataatgacaagacatgccttgccctttctgactgcagattctactgcaaactcaccgctggcgatcttgcctgcctttgtcgccagtccgatcattgataaagctttatctgtcaatattcttcatctcctcttccagctgtccgtaaacttccttcggtatctgcatcttcagtgaacgttccaggcctctgttcttaatggctttctgcagacattcactttttggacaaatataggcaccgcgtccgtttttgcgccctgttgcatcaatacatatctcatcttccggcgttttaatgacacggatcatttctttcttgctcttcatttcctgacagccgatacactgtctcataggaatcttcttcatggccgtcaccttttagtaaccgtaagcctgggattcactcttgatatcgatcttgtagcctgtcagtttagctgccagtcttgcattctggccttccttgccgatagccagtgacaactgataatcaggaacaacaacagctgcgctcttctcttcaggatccacatcaacagagacaacctttgcagggcttaatgcattctcgatgagaacggcaggatcctcgctccagttgatgatatcgatcttctcaccgcgaagctcatcaacaatggcattgacacgggcaccattcataccgacacatgcaccgacaggatcaacgtttggattgttggagctgactgcgatctttgttctggaacctgcttctcttgcaatgctcttgatctcaactgtaccgtctctgacttctgttacttctgcttcaaaaagtctcttcaccaattcaggatgtgtacgtgatacagtgaccttcggtccctttgttgtattctttacttctacaatatagagcttgatacggtctgtcggcttgaatacttcgcccttcacctgttcattctctgtcagaaccgcatcaaccttacccaggttcacactgatattcttgccgttatatctctgtacaacacctgttacgatgtctttctcgcgaccataatattcattatataaagactttctttcttcttcacgaatcttctggacaacgacctgttttgccttctgtgctgcaatacgtccgaaattcttcggtacgatctccacatgaacaatatcgcccggatcatagaacttgttcttcagtcttgcatccgcaacactgatctccatttcaggatcttccacttcttctacaactgtcttatctgcaaaaactttgacttcacctgtctcacgattcatagtcacacgaatgttatctgctttgccgtactcattcttgcaggcagcgacaagagaattctcaatagcttcaagcaaaatatctttgctgatgcctttttctttttctatatcgtccaatgccttaattaactctttaccttcattcatttttttaaattcctcctctatgtctgttctatcagaagaagaatgcaagccggatgcgcgcaatatcggaacgtttaaactgcatctcggtttcatcttccatttccagtgtcaccgtatcttcatcgtatgctttcaaaataccgacgaattccttttctttattaattgctttgaacaatttcacttcaacatccttgccgatgcttctcgcaaaatccttctctttcttcagaggacgatcaagacccggtgaactgacttccagaatatagttttccgaaataaagtcctcttcatccagtaaatcactgagcgcccggctgacttcttcgcagtcatctactgtaatcccgttctccttgtcaatataggcacgcagataccagttggcaccttctttcacccattctacatcgacaagttcaaatcctttcgcctcgacgatcggcatgagcattgcctcagtcctgctttcataatctttctttgccatgtaactcacttccttcccgaattaagattccttaacacgtacaaagagtggacttgcgcccactctttgctaaagttaatatactatcttaatcattgtaacaccagtttgattatttggcaatagccaacttgacgattattcataagaataaaacgcctgcagccgatgttttgtatcaaacagatcattatataaaagtttcttataatttttcagcagtgcttccgcttcttcttcaccacagtctgttcctgtattttccttcaatgcatgtgcagagataaacggaacattctgctgcagatcagacagataactctgaaaatccgtcaacggcagccctgctgccttcaaaagacgtacagccagatagttggcacttgtctcttccccctgactttcattgatgtcataattggcccacatgacaaacggcaccatatacctttcctttcggtcactgcctgttccaatggaagtgacaaacgcatcattgctgcccgtttttttgccggtgtctaccacattggtaatgtaatctgccggctgatgatcgccaaacatcataatgatcgtcggttcggactgattttcaaagtattccaccaactgtttgaaagcttcatcggaacgcttgatcaatgacagatactgttctgtagccttcagataagtgccgctgcctcccacaacactgacatccgggataaaattgctgtagcgtttgacatagctgccatgattctgcatcgtcacatcaaacacaaatagcctctcgtcagaagacttctcttcataacgactgataattttctgatacgtggtccagtcactgatataggttcgtaatatctcagggtttgaaaaatcatctttaaaatatttctcttcaaatcccaggtcatcatacaccgtatctctgttccacccctttggataataaggatgcatggacacagatgtataaccgatagaggacagctgactggccagtgacggcacttccgacttgatatactgttgataagggatactgcctgtgggcagaaaatacatactgagtccggtcagaaactcaaactctgtattggctgtgttgccgcccttaacagaagaatacatccatcccttctgggtgttctccgaaagagaactgataaatggcatcacttctgtattcgttgtataatcccccagcaccgacagatcagaaaatgcttcattcataataacaatgatattcggcttcttcgtcagatcaatgttgtctgcactgacattgctgtcactgttcccggaggatatctcatcctggattttggccagttcttcctgtgaataaccctccggcttgtcaatcttcagataacggagattcacaataaaactcagcgccaatccgttattgcgataataaaccgtcggcgtaaacagggttgtatccatatcaaatgttttgatggccgcatccgtctgaacataaccgcaaaatcccatgaacgctgcgcacatgacagcaataccggcaccgcggaacttcgacatcttaaacttcagccgcattttcagacacaatgaccagagcagcaggatcaacaggatcacgttgcatgctcttacggataatttatattcaaagttatcagccactgtcgctgccacacccactgagaaaagatcccatggcagaatcggcgatgatcggaacatcaggacaaaataattggccaggcccgctgcaccaagcagcatcgaaccaataaggatggacattcctgttcttccggttataaacagcagcacgccaaaaaacagataatacatgataaggttcagaataacagggccatcccacatctgactaagcaagtgggtataactttccacaagcataaaaacagctgccggtgcaaaggctgttaaaagtatctcgatcaaagctgaatatcggaatcgaaacagattcacaacaatggctgcagcgataaatacaaccgccagccacagccattcctggcttttctcagccgtctgcatggcgtacacagccagccccgccatcacaacgccgtataccacagccaatatggcagatttcttatcaatccatctgtcctgtttttcaatcggccgtttcagctgtcggccgataattgctaaatattcttttgcagaggaggatcgttctgattttgtatagattctcttcttgtattttttgtttttcaagtcaatccttcctcctaaaaaccaaaatcaaaaattgacaactgattgctctcagggagtccaccgagaagtccaagttcagccatagtatccagcacagtctgactgactttagccttctgacgaatatcgtccttcgacaggaatttctcaccgcgctcagtctctgcgtgagctgccacagccaatgcttccgcagcaataccgcccatgccttcaatgacagaaaacggcggcagtaatttgccctctacaacctggaatttgatggcatccgattgatacagatcgattttcagaaattcaaaacctcttgcatagaattcctgtacgatcttcatatcacgcagagtatcctgctctttcttggaaaggttcgggtttgctttataagctttgatatgattatcaatagccgctttaccctgacacatcagaccataatcaaaagccgttgctcgaatggtgaaaaaggctgcataataggccagcggttcatggatcttaaaccaggcaatacggatacccatcataacataagccaccgcatgggctttcgggaacatatatttgatctttttgcaggaccagagataccagtccggcacatcatgttctttcatgactttctcataatccggtgtcaggcccttccctttacggacactttccataatcttgaaagactgttcggattcaacccctttgtcgatcagatagatcataatatcatctcgtgtacagatggctgtggaaatctgggcttttccctcctggatcagcgtctgtgcattgcccagccatacatccgtaccatgggacagacctgaaatacgcaccagatccgaaaatgctttcggttttgtatcacggagcatctgcataacgaattccgtaccgaactcaggaataccaagagaacccaggtcggtaccgccgatgtcctccggtttaatatggagcgcctcaagaccatgaaacagcgataatacttccggatcatccagtcgtattttcgtggcgtccacgccggtaatatcttccagcatacggatcatggtcggatcatcatgtccaagaatatccagtttcaaaaggttatggtcaatggaatgataatcgaaatgggttgtaataatcttggttgtctggtcattggccggatgctgaaccggtgtgaaggaataaatctcttcaccatggggcacaacaatgataccgccgggatgctgaccggttgtacgtctgacaccgacgcatccgctggaaatccggtccagctcgcaggaacgtttatgctgttcatgctcttcgtaataatgcatggcataaccgtaagccgtcttatctgccaatgtaccaacggttcccgcacggaaagtcttgcctttaccgaagataacctccgtataagcatgagccttactctgataatcaccggagaagttcaagtcaatatccggctctttgttgcccttgaatccaaggaaggtttcgaaaggaatatcatgtccctccttcatcagcggttctccgcataccgggcagaccctgtcttccatatcacagccggaacggcccgaaaaacttttgacatagtccgaatcaaaatccacatagtgacatttcgggcacagataatgggcctgcagggaattaacctctgtaataccggccatataggcaacgaaagatgaaccgacagaacctctggatcctaccaggtagccgtctgcaacggatttccacaccagtttctgcgcaatgatatacataaccgcaaaaccattaccaatgatagaattcagttctctttccagtcgctccgtcacgatatccggcaaatcctccccgtaaagctcatgggcacgattgtaacagatatctcgcaggatgcctgccgaattctcaatgaccggcggacatttatccggccggaccggagaaattctgtcaatcatatccgcaatcctgttggtattggtcacaaccacctcttctgctttctcagctcccaggtactgaaactcatccaacatctcctctgtggtccgaaggtacaacggcggctgcagatccgcatcgccaaatcccttatttgacatgatgatccttcggtatacttcatcttccggattcagaaaatgcacatcgcaggtggcgcagacaggcttgttgaatttctctcccagctccacaatcttcctgttcagatcctgcagatcagcgaccgtgctgaccttcgtcattttcggatcacggatcataaattcattgttgccggtgggctgaatctccaggtaatcataaaattcgacaattctcgcgatttcttcttccggacgttcatctacaacagccctgaaaagctctcctgcttcacaggcagacccgataataagtccctcccggtattttgcaagaacactctttggtattcgcggacgtcttgcataataatccagatgagacaatgacacaagacgatacagattaatacggccgatctcattcttagccagaagaataatatggtaagtttttaatttcttaatggcatccacagacatggcactgtatgtattcagctcatccagatccctgatattctttttcttaaaccgttccagaaagcgcacaaaaacatccgctgtcgctccggcatcatccacagcacgatgatgattggccagagtacatcccatggcttcaactacggtatccagcttgtaattcttcagaccttccagaaagcttctggcaatccccagtgtatccacataggtgtaatcatagggcagccccagaacctcacaattgtgacggataaatcccgtatcaaaatccgcattgtgagccaccaggacagagcccccgcagaaatccatgaatttcggaaggatcaccgaaatattcggggcatcttccaccattctgtcattgatgctcgtcagtttctcgatttcaaaaggaattggcctttccggattgacaaattcactgaacttctccgtgatcatgccattttccaccttgacggcaccgatttcgatgatacggtcattcaccgcactgaatcccgttgtctcaatatcaaaaacgacaaacgtagaatccaggctctgccctctggagtccgtgacaatatttttgatatcatccaccaaatacccttccatgccgtaaatgaccttaaagtccttgccctctacacagtgattggcatccgggaaagcctgaacaacgccatgatctgtaatggccatggcctgatgtccccatcccatagccgtcttcagaagcttcttcacatccgttacaccatccatatcgctcatggtggtatggcaatgcagctccacacgcttaaccgggctgtgatccatgcgtttctccgtgaaatccggaatggtcttaataccggatacagaaccaagggcaatatcatgctcaaactggtccatcatggcaacggccttcattttgatgaaagccccttcctttaacttgtccagaagctccggcagacgttcattcttggtgaacacctttgctttaatggtatcggtaaaatccgttacagcaaacatcacgatggtcttctcgttacggatctcccgggtctccagctgaatgatctttccccggacaaccacttcgcccatctcatcgataatctcatgaatctctgtttcttcaccttcaaaattgcgtccataaaaaatatctttatcttccggaagccgctgtttcacataattcttcttgaaagcaggcttttctttctgctggacctcctgcttttcgacctctttctggtcttcttttgcctgctcataggtctgtacaatctgtgcgatttcttccttcatggcagaatcagcataaaccgcatacttactctttttcttcggcagccatccgaggacgatcccaagaggcatatcaaagcgctctgaaaaaatatgttccagcttatgcttcaacttctccattttcacttgcgcaatgcagttttcttccaccttcagctccagaacaaaaggttccagaaatgttttctctgcctttctgaaaagattggcagaaagttctccctcttcttccagttcatcgatcagacttccagtatacgcctccagcaatctcgccggcgtatactgccgggacaggtggtatttttcaaccaggcatacatctacctggtccttaaacatctggttacgaatagcccgctccgtctcccggatggccttatgggcaatcaaacgatcactgtgaatatagatcttgatgcgcgaatgatctctgctggccgccaccttttcacattccacagtttcaaacagctcagtcatttcatgactgagctttaaatcaggtaatatattcagaaattttttcacttaatcaaatccttctatttgttccagtgatcaagctcatctttcaaaacagccagaagctggtcttccggcaccttcttcacaatttcacctttcttgatcagcaggccttcaccgatgccgcctgcgacgccgatatcagcctctctggcctctcccggtccgttgacaacgcaccccatgacagccactttgatatccagatcgtaattctgaacaaggttctccactttgttggcaaggccgatcagatcaattcttgtacggccacatgtcgggcaggatacaacttcaataccgccttttcgaagtcccagtgtctttaaaatgagtttggctgacttgatctcttccagaggatccccggtcagggaaacgcggatagtgtgaccaactccctcattcagcataataccgagaccgacggctgatttgatattgccggagatcagggttccggactctgtaatgcccacatgcagcggataatccgtctttgcggcaatgagttcatgggctttcacacacatcataacatctgaagacttaatactgatgaccatctggtcataacccagatcttcaatcagatgcaccttatccagagcactttccacaatgccttccgccgttacatgaccgccgtatttggcgatcagatccttctcaagagaaccgctgttgacacccacgcggatcggcacatggtaagcctttgccttatctacaaccgccttcacgcgatccacactgccgatattgcccggattgatacggattttgtcaaccccgtgttcaatggccgcaatagccagacgataatcaaaatgaatgtctgccaccagcggaatatgaatctgcttcttgatctccgtgatggcctctgccgcctccatggtcggcactgccacacggatgatctcgcatccggccgcttcaagggccaggatctgggcaacagttgcctttacatcttccgtttttgtattacacatagactggatcgcaatcggataatcgcctccgatgcagcgatcgcctatgcgaatcacctttgcttttgttctatcaaacataactgctcctttaatgtctaaaaaccaaaaattctcgcaaaatcattgaacatgacaagcaccatgattcccataagaatcacaaagccgatcatatgcacaaacccctctttgtctctcggtaccggcttgcctctgagggcttccacaataagaaagacaagacgtccgccatccagtgcaggaatcggcagcagattcatcacgccaagattggctgacagcaaaagaatcatatctgcaatggttagtatcacacttcgaaggccgtactttgccgcagattcatagctgtcaccgatcacctgaaacatacctacaggccccgccacatcgcttcttgatacctgtccctgaatcatcatctcaaggctcttgatcaccagatcaatatttgacttcacttcatagaaactgctgataagaagtccgccgaacttcggcttctcctgaacaccgcccacaataccgatgcggtatacaccatcatcggtcatctccggcgtcactgtagtctgatgcttctcaccgtctctgatgtaggtgatcgtacatttccgtccctgattcagtgcaatatgcattctgaaatcagaaaatgtatgcacagatgttctgtccgcttttgtaatgatgtctcccgcttcaaggccagcttccatggccggtgatccatcctccacctgaaggatctcacctgatatataaccattcataccgataatgatcacagcacagacaaaagccatgataaagttaaaaaccggtcccgctgctacaacagccattctggcccacacagacttcgaattgaatgacccgggaatcacttcctctgctgtatcctcaccaagcatcatgcaggcaccgccaaggggcagcagccttaatgtatattctgtctcaccgcggcggacaccaaaaagcttcggtcccatgcccacggcaaactcttcaacaacaataccgttcttctttgcaactataaaatgtccgaactcgtggaatatgacaatgatgccaaatacaagaagtgccacgatcagcttcaatctaccacctgctttctatataacgataggtccactgttcagtctcaagtatatcttcaagagacggatgatcaatccactgatgggctgccatacactctgaaataatctcgggaatatcaagaaagcgaatctttctgtcaaggaacatggccacagccttctcattagccgcattcaatgctgtcggcatgctgccgcctctgcgtgctgcttcataagccagtgccagtcctctgaatgttccaagatccggttcttcaaaggtcattgtatgcagtttgaacagatccagggcttctgactgaagcggctttctctcgggataaaacagtgcatactggattggcagacgcatatccggtgtgccgagctgggcaatcactgcatgatcctggaattccaccgcagaatgaatcacgctctgcggatgaacaactacctggatctgatcaaggtctacaccgaaaagccacttagcctcaatcacttccagccctttgttcaccatggtcgctgaatcaatggtaatcttgtgtcccatagaccagtttggatgcttcagggcatcctccacctggacatctgcaagttcatccagggttttccctctgaaagggccgccggaagctgtcagaaggattcttctgatgcctgatgcatgttccccctttaaggactggaaaatcgctgaatgttcactgtctaccggcaggatctgcacatgataatcctttgccatctgcataatcagatggcctgccgtaactaacgtctctttgttggccagtgcgatatctttgccggctttgatagcttccatagtcggacggataccgatcatccccacaacagctgtcacaactatatctgcctccggcagtgtcacaacctctatcattccttccataccagaaacaatcttcacatcaagatccgatacggcaatcttcaattctgccgccttcttcgcatcccaaacagctgcgatcagcggatggtactgtctgatctgctgttcaagaaggacaatattcgaccctgctgctaaagcagcaacgctcaaatcctgcggatgctgtgaaataacatccagtgtctgtgttcctatggagcctgtagaccccaatattgcaatcttcttcaaaaatgatcttcctttctcaattcaggacagttatgcgcccagacataccgccagtatatacacaaccggtgctgtaaataagatgctatcaaagcggtccagaatgccgccgtgtcccggtatcagacggccgtagtccttgatgcctgtatcacgcttaatggcggatgctgccagatcacctacaacagcaatcagcgcgcccacacctgcgataatcgcacagtcacgcatcggcacattcagtgaaatcaggtgtgctccaaaaatacgtccgtaaatcagtcccaggagcacagcacctgcaataccgcctataaaaccttcgacacttttcttcggactgagtctcgggaacatcttgtgcttgccaataagcatgccaacacagtaggcgcatgtatcattgccccatgcacagatgaaaatcaacggaataatatataatccgtcattcagcatacgcaccttgtaaataaatgacatcagcacaaccacataagcaagtcctgccactgcacaaaaaatctcattgaccttgtacttcggaaagctgaaaacataaacagccatgatcagcagtgttcccactgctgctgccatcagttctccttccggtacagccgcccacaaaagcatttcatacaaaagggctccaatatagcccgctatagccggtcccttcttctcaatacctgaagctctgtataattcaaacaggccaatcatagagatcaatgccacaaaggcaaataaaatattgccgccaaggagcattgccgccacggcaatagccagtacaatcacaccactgatcagtcttgtaataaacaatttaaacaccaccaaatcttctgtcacgttttgaataggcacgaatggcttcaatcattgtctctttgttataatccggccaaagaaccggtgtaaaatagaactcagaatacgccatctgccagagcagaaaattggaaacacgctgctcgccgcttgtacggatcaccagatccggatctggcatgccggccgtatccagatagtgctcaaacaatgcttctgacatctcatccggattcgtatgcccgtctgccagcatcttcttcatggcacggatcatctcatcacggctgccgtaattaatggcaatcgtaaagttcagtcccgtattgcccgcagaagctgtttccacatccgcaatggacttctgaatatcttcacttaacccggtcttgtcaccaattacccggacgcgcatattattcttcgctgttctctcaagggaatcgaccatatactttctcaaaagcttcatcagagcatccacttcagactgaggccgcttccagttctccgtcgaaaaagcatacactgtaaaatacttgatgccgagatctctggcaacttcacacattttctcaactgtcttcgcgccctgcatatgaccgtaatttcttggcatgaaacgtttcttcgcccagcggccgttgccatccagaataatggctacgtgctccggcacattaagggtttccccatctatgattctctccatattatactcccatttattcatcaactgtaaccatctcgtactggcccagctgtcatcaaccatctattaacagatatgtacgaggctgttgcatcctccgtaaaatatacagattttgcagcagccccacccaattactttataacagtatttgtcaagacacgcctgttagactgtcatgatctcttttgtctttgcctctacagccttgtcaaccatagccacatacttgtcagtgatcttctgaagcttctcctgtaattctgcatattcatcttcagaaatctctttggctttgttgctcttcttgaaagcatcattgccgtcacgacggatattgcggactgcagtcttcgctgcatctcccttcttcttcacatccttcgccagttccttacggcgttcctctgtcagttcagggaatacaagacggatagacttgccgtcgttcgttggtgtgataccaatatcagaagcaagaatggctttctcgatatccttgatcagcttgctctcccatggctggatcatcagtacacgtgcttcaggcactgtgacattgcccacctgctgaagtggtgtcggtgtaccataataatccaccttcagtttatccaaaatatgcggattggcacggccagcacgaatggttgtatattcgcgttccagtgcatccaatgacttctgcatctttgtctcatatggctgtaacttctcattactcataaatatagttcctcctaatatccttatacagtcacgtaagtacctgtaaactctccgtataatgtcttcacaatgctgttctcttcattcaggccaaataccaccatcggcatcttgttctccatgcacatgatcgttgctgtcaggtcaaccacctgcagtctctcatctacaacctgctgaatgctgacgctgtcatacttcttcgcattcgggttcgtcttcggatcactgtcataaacaccgtccacagccttggcaagtaaaatcgcatccgcctcaatctcaatggcacgaagcgttgtacctgtatccgttgaaaaatacggatgacctgtgccgccggcaaagaaaacgaccttgcctgcattcagatcagcaacagctgcatccttggaaaaaagcttcgtaaaagcgccgcacataaatggtgtatacacttctgtctgcattcccaatgtacggaaaatctcagacacataaatacagttcataactgtacccagcataccgatctggtcagacttcgtacgctctataatcttgctgctgttgcgtccgcgccagaaattgccgccgccgatcacaatcgcaacctgcgttcccttatctgtaatctgtttcacctgttcggcaaccttcagacaagttgcctcatcaaagccaaaatccttgtctccggccagcgcttcgccgcttaattttaataaaattctctttaaatcgttcatcatcataccgatgtcctccgttcaccttataatctaccataaaactgtatatttgaccagtccttttcttacagttttgagtagccgaaactgttgacaatggcatcgataggcatcttcttacggcacatcgggcattccgacggtaaataagcctgataatccggcaaatcttccttctggaaaatggagaagatctccatcccttccgctgtctgttccacgttactgaaaatagcagccacgcctcttaccgttccgccgtaataagaaacggcctcagccgcccttgtaatggtctgtccggttgtcacagatgctgccagtacaagcacctgcatatgcttgatcattcgcaatgtactgtccatgaaaacaagctgtccataggcattcacatccggtgtaataatcgagatattcttaccactgttaacggacataatcccggtatctgcgagaaactctgccataaaagcaccgatcagctctgttccgtccagacatacaatcgtatcgatcatcgtattgttctgaaaatgattggccagcactcttgctgtttctcttccattgttgtgtctgcacttaactgtcgacatatcaatatacgtattgatatgggaattaaccgttgcaaaatgaccctccagaatcttaatacgtgccttcggattacgcgccgatctcagatcagttaaacattctctcatacatagacccccttctctgcagatttccttatccccataaaattcctgcagacttgccagcttctgttatgcttctatacggatggacttaaataacgtaatcattgcccttggcatcctgccagtctaaaagatcctcaagtgtatacttgtcaatgactgaattgattgcctcatccaattccttccatatacgaattgtaacacaatcctgcattttcggacagtcataattgctatcggtacatgacacaggggaaagatcgccttctgtcaaccggagaatcatccccactgtgtaatcttttggcagtcttgccaggcgatagccgccctgcgggcccctaatacttttaacatagcccgccttcgtcaacaccgacacgatctgctccaaatacttcacggagatatcctgtcttgcagcaatatctttaattcgaaccggctccccgtgatcgtttgtcgctatatccagcatcatacgcaatgcgtatcttcctctggttgaaatcttcatttattctttcttcctttcatcttcttcacttaactaagcccctattttctatacagccggcttattctttcatttactttgttctctgacctgacatctctcttcacttatgtctttcttaacttaatgtcagttccggactcttaatactgactctcgtgtgcgccggtacactttctgtaataaatgagttgcccccgataatagagtcgcatccaatcactgtctcgccgccaaggatcgtggaattcgcatagatcgtcacatgatccccaatggtcggatgacgtttggttccggccagctgctgtcccttcctcgtggacaatgctcccagtgtcacgccctgatacagcttgacataatcaccgatttctgttgtctcaccgataacaatacctgtaccgtggtcgataaagaaataacgcccgatagtggcaccggagttgatatcgatcccagtcttgccatgggcatattctgtcataatacgcggtataaaaggtacattctgaacatacagttcatgggcaattctgtaaacatagatagcaaataatcccggataagagaaaataatatcctctttgctctttgcagcaggatccccgtcaaaaccagcctgtacatccatcagcagcatcttctggatatacggcagacggctgataaaacgttcgcagatctctcttgccttctccgtcacctctgcactgctgctttttcccttatcatcatacaaaaacgcaatctcaatctgcgctttcaattcttcataaatatgcgtcagcatattgccaaggaaatatcccggcatggtgctggatatattctcatccccgaaatacccagggaaaacaacacgtcttaaatccttgataataccaataatcgccccacgactcggcagatgaatactctcctcatctgtcacatacacatcctcgttcatgcaagtctctgtaatattcgccaccacattctgaattgtctctctgatcatccccgtcatctcctatctctctaaaatccatatactgccccgtatcctgcttaagttcaagcttggtcagcctcataatattcagcatttcctagttgaattatatgaaattataattcaaaacgtgcgcaaagtcaagaaaaagcttgactatataatgacaccctttgctccaaaagtcatagaataaatcaaagactttcggagttttttatcatgcgttttaatccttttgaagaaaaaccgatgcctttagaccagctttttatggactgggataaactttatccgaaaccctatcatctcggcaccgtccatccttacaccaaggtccgcattgtcctcatgaacggcaccgaattcgaagcccagtggttcggccatcaattcagccgtcactgtcaggataatgatcttcggcgcgaactggctatgatccgccgcatagagcagatgcagcaaaaacggatcagttgtctgaagcctaaaaacgaaaccgttcttgagcataccattacctatgaacagctggctgttgatctgactgcctttctggcaagacgtgaaaatgactgcaatgtcaaaacagccctggattttgccctgctggaagattttgaccatttgtaccgctatgccaacctgttggattatgaatatggtacctgccctgaaaaactggtgggtcgctataccgagatgacaccggcccgaccgaccatcgcccaccaccgctatccgacagacagcattttccgttccattgacaaccagacagcttccctgaaaacaaaactcggtattaatatcatcactgccgccgagcagcagacgatgaattattatatgaatattgcaccgttttattcccgttccgaccttggaagacgactgtatcaggaaatcggcatgatcgaggaagagcatgtttcccagtacgaaagcttaaaagacccatccgccacatggctggaagatctactgatgcatgaatataccgaatgttacctgtattattcctgtatgatgacggagtgtgatctgtacatccgaaagatatgggaagaatgcctcatgcaggaaatctctcatctgcacaaagccaaagaattgcttgagaaatatgaaaacaagagctggcagcaggtcatcggcggctgcggtgacttcccggatatccttgttctcggtccaaatatcgattatatccgtcatatcattgctacaacaaccggcaatacgcaaaaagaggaagacgttgttcctctcggacgtctctctgaaaacgatccgttcttcttctaccagcacgtcatgaacgacccgttatgtgaagtcgccagccatgtcaccatcgacgcccgcatacgcagaaaaggctgcgactatcgctttgaaatcaaagaaaatccattgccggagctgcgaaaccggcgctgcgacaacacatctattgggcgcatcccggcctgcacaccggcatcagcttccagtgaaggtacgacagcagataactgccggtgtccgattttctctaagtaggtgtggccctgtaagtatataacaggctccccaaggcgttcttcagcacctgcactgaaaaacgccccggggagccgttttgttgttttacgagggcgcacgctttctctgatcagcgtgttgttctctgttattcgtatttcttcgcctgtgaacggatcagctccatgtcatcaaagtagttgatcttcatggcatctctgacttcatgcaacgtctgagcagctgtttctctggcaacttcactgcctttcttcagcacttcatagacatacggaatatccttctgaagttcctcacgacgctttctgatcggttccagttcttcctgaagcacgttgttcaggaacttcttcaccttcacatcgccgagaccgccgcgctgataatgttccttcagttcatccagattcttgtaatccggcagatattcttcaaaatgctggtcattgcagaacgcatccagataagtaaagactgtattgccttccagtgaacccggatcctcaatacggatatggttcgggtctgtgaacatgctcataaccttcttcttgatatccttcggatcttctgcaagataaatacaattgcccagagacttgctcatcttcgccttaccgtcaatacccggcagtcgaaggcaagcttcattgtccggcaataaaatcttcggttccaccagtgtctctccataaacagaattgaacttgtgtacaatctctctggtctgctcgatcatcgggctctggtcttcaccaacaggaactgttgtggccttaaatgccgtgatatccgcagcctgactgatcggatacgtaaaaaacccaaccggaatacttgtctcaaaattacgcatctgaatctccgacttcaccgtagggtttctctggagtctcgaaacagtgacaagattcatatagtaaaaagataactcacataattcagcaatctgtgactgaataaacagcgtggatttagccggatccagaccgcaggccatataatccagtgccacctcgatcacattctgacggaccttctccggattatctgcattatccgtcaaagcctgtgcatctgcgatcataataaaaactttatcatattctccggaattctgcagctccacacgacgcttcagtgaacctacataatggcccacatgcagacgtcctgtcggtctgtcaccggtcaaaataactttgctcatcttcattcctcctggacatactaactccttgtagtgtaccacaaaaaacaaatatcatcaagaacaaacatttttgttgtaaaaccaacagacttttacttcaaagcgaattacaataaattcatcctagtcaattaggttttttaaggaggttttttatgattcgcagaattattaccattgatacagaaaaatgtaccggctgtgccctttgcgtcaacgcctgtcacgaaggtgccattggcctgagagacggcaaagcagtgcttctccgcgaagactactgtgacggcctgggtgattgtctcccagcctgtccggcagatgctattcattttgaagaacgagaagccgcagcttatgaccatgaagccgttcaaaagcatcttgctgccaggaaacatgctgccgcaggcggatgtccgggttctgctgctgcattcttcggtcatgaacacactgagaagccgcaggcagataccgtatcttccacttctgcacttgctgttcctgaaagtcagctttcccagtggccggttcagattaaacttgtcgcaccgaatgcgccttatttcaacggctgtgatctgctcattgccgcagattgtactgcttacgcttacggcaatttccatcaggcatttatcaaagaccatatcacccttgtaggctgtccaaaacttgatgccgtagactacagtgagaagctgacacaaattttcacctataatgatatcaagcgtattaccctgacccgcatgacagttccttgctgcggcggcatggctatggctgttcagaaagctatccaggccagcggcaaaaatattccattaaagattgttatcatttctcctgatggacagattgtgcaaacccaggaagtatagctgttcaaacgatgccccggattccatcattctccgttcatgcctatagtaaacaccgacacctgctcattcgcactctatattcagcagattttctattggcagctctgtttgatcgaccattatcaacatttttctgttcctgtcaattttccttagtcttcctctgtaagtctgccttgcaccgcctgtttttctttcatccggagcaaaatacgtcaccatcacctcaggctgttcctgtaggcgcgccgaaatcttctgcagctgtgcattcagccgtgttttttcatcctcgtccaattcctccctgtcatccgtcagtctggcggtttccttcaccgctgcttcataacccgtcaacgccgcaaaaggtgaaaactgcgccgcccggtcttccatggacatgggcgggtgcttcttggaaacatgatgctgtttatcaatgatatctgcataccgcagccaatccggcccgctgcttcgctcttttccgtcattgatgcctgttcgatatcctttcatttctgcatccatcacgccttatggcctccaatctgactgtttctctgtctggctgttgccccttcttccagattcatgccttttaaaatagcatttttgccaaatttcttcttgatggccaatgatgcctcctgcaatttgcgttctctggccagccgttccgattctgccttttgttcagcttcacgtgccgcataatccacgaacagattcatctgctcaaattccgttttcatggaaactgtcttttcatccgccacatgattcgctgtgacataaatcctccggacaagcagcttcggattaacaatccggtcaaaaagatccatcaccgcctccaagatcacttttgaagaagaagaggctccttttaagttgaccgtcccgtgggcatgtttcggcatttttctgccataacgatcggttgtcaccgcacctctgtatgcttttgcaatttcaggattggtcagattatcaatatcatatcccacggtcagtacaagctggtccgtcatcagtcgcttctctaccagatcaaggacaagcatatctgtcatctcccggaccaccaaccgtgcctggtcaaatacatatggacactgtagcacctgaccggaaccaaggctattgcttctcggtttataggccttgatcgccgccatggtacaaggttcccatccccaggcgtgatcgatcaaaagttccgcattcacaccaaaaagacgatacagcaaatcttcattgtaataatcatccggtcctcccatggaacatctggcaatatctcccatggtataaatgcccacttcctccagctttctggcatagccccgtcccacgcgccagaaatccgtcaaaggacggtggttccagagcatctcccgataactccgctcattcagttccgcaatccgcacgccattaacatccgcctttgtatgcttagccccaatatccatggccaccttacacagataaagattcgtaccgattcccgcggtagccgtgattcctgttgtcaccagaacatcaagaatgactttcatggccagttctctggccgtcatctgataaagcgccagatactgcgtggcatcgatcatcacctcatctattgaatagacatgcatatcctccggcgcaaaatatttcagatacacctgataaatctgcgtggagacttccatataatgggccatctgaggcggcgcaataatataatccagtgccatgttggaagaatatttgagtacattggcatcactgctgctgcctgtcagttcatgccccgaagcctgtctgcgacgggcggcattcacttctctgactctctgtaccacctcaaacaatcgcgctcttcccaaaataccgtaagctttcagtgccggagacactgccagacagattgtcttctctgttcggctgggatcagccaccaccaggcatgttgtcattggatccttgccacgctcaacgcactccacagatgcataaaaagatttcagatcaatggcgatatatgtttttttctgcatgactgctgcctcctttcccccggatgatctgcttaaattcaccgacttttatacttcaatcttattctgattttaccatttcaccgaacaaataacaatataagagcagaaagaaagctgccgcttcatgtattttatcatgaaaacggcagccttgttttttagccatatgacacccagataatcaatggtacgatacaactaacttctattctctgatcttcatagacaatgacatcatacatccgccaacagcccctgcatgtctcaccacttccagattttccggtgtaatgccgccgatggcataaaccggaagcttcgtcctgtgacagacattttcgagaaatgtcagtcctcttcccggcaatccttttttgcagtcagtatcaaaaatgtgcccggctgtcagacaggtagctcctgccttttcagctgccaaagcatcttccacagagtgtacagatgtaccgatatgcttaaagccctctaacgcatctttttccgacagctccatcaaaacaggcagcggcaggtggatattctcacaattcagctttgcagccacttccgcaaatgaatgcagaatacatttcttatgatgctcatgacatatcatcagcacatcctttgccagatgctcatattcatctggtgtcatatctttttctcgaagaatgatggcatcgatatctgtggatgccagaaattctatctgttccagaaaatctctgtcacatagatggcgatttgttactgccatcatatgggcataactgcggctagacatagatgtattcattcagcacaggctgaagcccttgattcttgatggcatcatagatttcctgaaggctgcggttatccgcaatttcaaactgctcatcaccgctctcagcttcattctccttgcctgtatatttttcctcatggtcaccgataccggtgctgacacctgctgaaatcttggttgccgcaaagcggatgatgtgatcacggaatcttgccacctctcttgaagagactgtaatacccgcatatggcaggaaaatacgatacgcacagagaatctgacacaactgtgtctcatggacatccttcggattgatcttgtcattattaatgatcggacgcagtctcgggcaggacaaagacatctcagcatgcggatattttcgctgcagataatatacatgcagcgctgttgccagggcatcctttctgaaatcatccagccccagtaaagctgagaatccgacaccgcgcataccgcccattaaagctctttcctgagcttcaaaacgatacggccatacacgcttatggcccatcagatgcagcgtttcgtatttgtccgagttataggtttcctggaaaacagtgatataatccgcaccgcattcatgaaggtacttatattcatccacattgaccggataaatctcaagacctacatttctgaaatacttgctggccagtttgcaggcctcaccgatgtatttcacatcactcatatgtctgctctcgcctgtcagcatcaggatttcctcaataccggaatctgcaatgactttcatttcatgctcgatttcctgcatgttcaatttcttgcggtgaatatggttataacaattaaaaccacagtaaacgcaataattttcacagtaattggcaatataaagcggtgtgaaaagatacacactgttgccgaaatggttgcggcgctccacagcagctttttctgccatctgttccagaaatggctgtgccgccggtgaaagcagtgccttgaaatcctcgatggaacagacatcatgagccagtgcagcctgcacatccgcagctgtatacactttctcatcatagctctccacctggctcatgaccttatccctgatatctgttgaaatctgatccatgccttccatataagccatatggtctgttctgaaagaaggatcctgctccaatcgttctttttttgcctttgcttcaggagtcatatcatcccactgaatgatgtattcttcatttcccatttcaagcgcccccttagtcatgtaaaaatcctgtcagaggatcagatgcagaggcgcctctgtgaaggacacgtccaagacctgacagatacgcggcacgacctgctgcgatggcgttcttgaaagcgccagccatagccgggatatcgcctgcagttgcaatagctgtattggccatgatcgctgctgcgcccatttccatggcttcacatgcctgtgacggacgaccgataccggcatccacaataatcggaagatcaatttcatcgatcaggatctgaataaattcctttgttgcaaggcccttgttggaaccgattggagaagccaacggcataatgcaggccgcaccggcattcaccatatctctggctgcattcaggtccggatacatataaggcataacaatgaagccttccttagccagaatctctgtagccttaattgtttcataattatccggcagaaggtatttggaatcatgcatgatttctactttgacaaaatcaccgcatcccatttcacgtgccagtcttgccaaacgaacagcctcttcggcatttcgcgcaccggaagtgttcggcagcagtgtaaccccttccggaatataatccagaatattctcttctttacgagtattgacacgacgaagtgccagtgtaataatctctgcgccggcatcttctacagctgcacggatcagattcaggttgtatttgcctgaaccgagaataaatcttgacgtaaatgtatgacctcccaatgtccatgtatctttattctgcatagttgttccctactttcatttttgtttttgcttctgcttttattttcgcttctgcatttacttttgttcttacttttacttctgcttttactttcacttttgctttcgcttttctaaagctcagctgttctctgtcactatttccattgacaattgattgcaattgttttttattttttcagttgttaggtacctaactaattttctaattaaataaggtacctaacaattggatttttatatttctatatcttatcttcattcgactgtaccggccgtatccttctatatctcatcagcatccagaccaaggacgcagcgcagaaccatattggcttcgtgtgccgcacaaatggtcactctcggcgccatcagtcctctgcccggcatggcgccgctgacgccatccccgcaaatataaaaatgatcattgatcttgcgcgtcttgattgtgttagatgagccatagcctgccattccggaaccgcagatcaatgtcttctccggataataacatagaatctgttctgtcagcattgctttcacatctggcttatcaaaggcctcacagatgatgtcgtcatctttaaaaagatcccggcaattttcttccgtaatacgcactgtgtcaatctgtacctcgatatacggattcattcgctgcaattcatcctttaaggcttctgtcttgtacatgcccagatgttccaccatatactgctgccggttcagattgcttggctccacaatgtcaaaatcgatcagatgcaaatgaccgataccggttcttgccagcatgattgcaatattcgatcccaggccgccaagacctgcgattgccacccttgccttcttcgccttttcatagacatggggcgtatgtcttgcacagagcatactctccatctcttcacgatccggcatcttgcctttctgtatccaattgatggtcattccgtccttcaaagacagattctcatccgtctgaaagccttcaacaatccatacacaatgtctctgaatatcctctgacaggccttccgaagcatacgtctgtcgcttcaaatcttccatatctgccgcttctgtcttcacagattgcccgtttaaaataatctctgccacatcaaccgcctcctacaaatcggacaacctcaactgtatcgccatccttcaaaatggcttcttcccatatacttctcggaataattgcgccattgcactcaaccgcaatcatcttgtccgggtacccgtgttcctttaaaaaagctgcaaccgttgtaccctctgcaatttccagcatttcaccattgaccttaatcactacgaacccctcccctcgtcacaaacgtgcaccaattttgacgttctcagtatttgctaaggttccatgcaagcatgaactttggctcattacccgcgtaaaaaaagccgcacaaagaactacacccgtggtggtgtaccccttcatgcggctaaacatcaaaattcataaccattcacataacagtcataaaccaaatgaacttttgcactctgacttaattataacgttttttaactatctgtcaaccccatattccgcctgcatcccatctaaaacatactttgtccgccataaaactctcacttttccaaagcaaaaaccatatcaaacatttcctgtcaatcccccaatttactatacaaaatcccgaaactgtagcctattttctcatttcattttgataaaaatattgcttcgcgttataatactctctgaataaataacttttttatatttgatgaaaataaattacatgcgaaattctcaccatatgtaccgctgccaagaagtgacaacgcgagtgtgcctgcttaagaacgaataattttatatatttcataaagcctaaatggatttcgcaagattttaggagattttttatgtaccagattattacagacggttcatgggatatgggcagtgaacgtgcaaccagattcggcgtggatgttgtgccttattatgtgaccatggacggcgaacattatttaaaagagatcgaagaactggatgtccgtgatttttatcagtttatggtggataatccaaagattttcccaaagacctcgctgccgacagttcaggattattatgatgtttttgaaaaatatgccaaacagggcattgatatcatctgctttaccttaagtgccaaattcagtggttcctataattccgcccgcaatgcaggcaacatgattcaggaaaattatccgggtatccgtgtaacaatcatggatacaacccttgccaccctgatgcaaggtctgatgattcaggaaatcgtacgtttccaacgctccggtgccgattatgatgccctgatcaaacgcgccgatgaaatcaaagacacatgccgtattttctttactgttgaaaatatggattaccttgttcacggcggacgtgtcggcaagttggccggcatctccgccaatattctgaatctgcgtccaatgatccttatgacccagggcgaactctttccatccggccttgccagaggccgtgttcagtcccgcaaaaaggccatggagaagttatttgctcacatcgaagaaaacggcaatgatccggaccgttatatctatatggtcggttacggctacaacatcaaagaaggcgaagatctccgcaaagatgtgattgaacacatgaagaagaaatggccgggctttgaaccaacggtcgaaatcggacagattggtgccaccatcggcgtgcatacaggccctcatccgattggttttggactgtgtgagaaatcctgctagccaaacgcctcgcacttcaagttccatcaacaaacttttaaatggttttaaaattactgaaatagatacgctttatccattgagaaatcgttggatttatgctaaactttttataactaacgttttaaattgataaaaatcatttaggaggtccggatatggcacacgttaaaattcagtatgatgtaatggatgcattctgtatggatgttttccagagattcggtttcacaaaagaagaaagccgtattatttccgatgttttattactctcagatgtttacgggattgaatcccatggcgcgcagcgacttgtccgctaccacaaaggtattgccagcggcatgatcaaagttcacgccaaacctgaaatcgtttttgaaacacctgtttcagccgtcgtagacggtcatgatggtatgggacagttgattggtcattttgccatggatctggctattaagaaagccaaagagatcggtatggctattgtcaccgtcagagattccaaccacttcggtatcgccggttattatgccaagatggcctgcgatcaggggctcattggtatggcctttacaaactcagaagccatcgttgttccgacattcggcaagaaagccatgctgggcacaaacccaattgctatttccatgccggctgaaccatatccgttcttcttcgatgcatctacaagtgtcgtcacccgcggtaagttcgagatgtaccgaaaagccgagaagccaattcctgactgctggggtctggatgccaacggccatccttgcacaaacgctgcagaagttcttaccaacatcgacaagaaagccggcggcggtattatgcctctgggcggcgcagaagaactgacaggcagccacaaaggttatggttatgccatgctctgcgaaatcttctgctccatcctttctatgggtctgacatccaaccacagtatccagaacggcaagggcggcacatgccatggttttattgccattgatcctgctgcattcggagatgccgaagccatcaaacagcacctgtccgatttcctgacagaactgcgcgaatctccaaaggcagacggcaaggaacgcatctatacccatggtgaaaaggaaatccttgcgacagcagaccgtatgaagaatggtctggatgttgacgtcaagacactggctgagatgaaggatctgagcgaatatgtcggtgccgattttaacagctacttcggagatatttataacggataacatccgttttatccgatcagaagactgaaccaaacagatgactgtataaaagcaagatagtatcaaaaatcttttagttgtactaaatattttttagatattatcttgctttttgtctgttttatggtatgatgaatatataaattttagtaattgttcaaagccattttatcaatgtgctgcaatcagcgttatgaacatatgagcaattacgtgagatattatttttacatgatttcaaggaggctttttattatgaaagaagtaattcacacatctaatgcaccagcagcaatcggaccatattcacaggctatcaaggcaggcggcgctatctacgtttccggtcagctcccggttgatcctgctacaggcgctttcgcaggcgatacaatccaggaacagacacgtcagtctctgacaaacatcaagaacatccttgctgaagcaggtacagatcttgatcatgttgttcgtgttgatgttttcatgaaagatatgaacatgtttgctgacatgaacgctgtatacgcagaattcttcacagagaaatgccctgcaagagctgctgtagaagttgcaagacttcctaaggatgcccttgttgaaatcggcgcaattgctgttgttgactaattgacgaccaactataaaagaaatacctccggaaacgggctcagcgccactgtttccggaggtatttcttttatagttggtctgtgccatggccgtatcaaaagcagccgtcatcgcacagatttcttaattttcttttcaaccacattgcttagctgagcagtgctctgtcgttggcgaattcttcgccgctggctttttcgaactgatgcagcagatcttcgacggtgagtttctttttctcttcgcctttgatgtccaggatgatcttgccgtccataagcatgatcaaacgattgccgtgagcgatggcgtctttcatgttatgggtgatcatgatggttgtcaaatgatccctgttgacgatcatatccgttgtctcaaggactttggctgctgtcttcggatcaagggctgctgtatgttcatccagaagcaaaagcttcggttttttcaatgttgccatcaaaagagtcagtgcctgtctctgaccaccggataacaaccccacctttgatgtcagacgattctcaagtccaaggccaaggatcttcagcagttctttgtattcttcacgctctttcttggtaattccaatcttcagcgttcttgactgaccgcggcgctgtgccaatgccaggttctcttcaatacccatggtagctgccgtaccggtcatcggatcctggaaaactcttcccagatatttggctctcttgtgttcggaaagttttgtcacgtccacaccatcaataatgatctgcccttcatccaccggccatacacctgcgatggcattgagcatggtggatttgccggcgccattgccgccgatgactgttacgaaatcaccgtcttcaagattcagggaaaggccattaagggctctcttctcattcactgtgccggcgttaaatgtcttataaatattcttaatctcaagcatctgcgctgcctcctcttcttaccggttttgcaaaatatctgctcttccaatacgggattgcaaggaaaattgcaacaacaattgcggagaacatcttcaaaaggtctgtatcaacgccaagccaaataacaacctgaagaaccagatagtagataacagcaccaaaaccgactcttaacagtgtcagggcaaagttacggaaaatacgtccgaaaatcgcttcgccgataataacggccgccagaccgataacgatagcaccacgtcccatattgatatccgcaaatccctgatactgagccagcagggcgctggaaagtgctacaaggccattggaaatcatcaggccaagtactttattgaagttcgtattgattccctgagcccgtgccatattgctgttgcagcctgttgcacgaattgaacatccaagctctgtaccgaagaaccagtagagaatggcaatcagtacaacaatcataatcgcaacgatcacaatggtattcttaaaaatcggaacacctttgatgtagcgaagagaaacaagcaaattgtacttatccacattcagtgcctggttggacttgcccatgatcttcaggttcactgaccaaagtgccagctgggtcagaataccggaaagaattgccggaattcccataaaggtatggaaaaagcctgttgcaagacctgccagcatacctgcgataaatgccgccagcatcgctacccatacgttgtgtccattcatcatcatcataatgcagacagcaccgcctgtacacatagtgccatctaccgtcaaatcggcaatatccagtgttctgaaagtaatataaacaccgattgccataattccccagatcagtccctgggcagctgcacccggcagtgcgctgatcaatgccattatattcatggctgattcctccttgctgttcatctagttgactgtatccatgctcacaatgataccagatcataccgcatgcataacacacaagatggggccgccgcagaatataccgctcgaaagcttcttatatactgtgcgcagcccctatttatcttgttatattcctatgtatgattattcctcaagtgctacataatcatcaggtactgtaataccatatgcttcgcagcggcttgcaacgtattcttttgtaaatgttggtgcatattcaattggcattgtagagatatcttcaccctgaagaaccttagctgccatcttacctgttgctacaccaagatcatagtagctgatggaaagtgttgcaacaccacatcctttgcagataccctcttcacctgcaacaatcggaacgcctgccggtgtacagatgttgttgacgatctctgtattgttggcaactgtgttgtctgttggtacataaatcacatcactgtcattggcagcggatgtacatacagatgaaagatcgttagaatctgagaatgcatagtattcacatgtataaccaagtttctcaagatatcccttgattgtatcaacctggaacttagagttagcttctgctgagcaatataacagaccaatcttcttggcatcagggaataactcatgaagcatatcagcctgaccatctaatggtgcaaggtctgctgtaccggaaatattgccgccgactgtaccgtcaaagttgtcaatatcaagggctacaccgtaatctgtaacagatgtaccgagaatcgggatagtgtctgttccggctgctgcggcctgaagagcggctgttgcattcgccaaaattaaatcatcattgtttgaaacaaagccattgataatcgttgcacatgttgcagaatcaccctgagcattctgctcatcaaatttcacattatcaccaaatgcctctgtcaatgcatcttcaaaaccttttgttgctgcatccagtgcatcatgctgaatcaactgacagataccgatgttatacaccttgccgtctgttgaaacttcactggccgcctcagaaccgctctctgctgtggattctgctgctgtttcagaagcgcctgtctcaggtgcctttgtctctgtggatgagctgccgcatgcagccaggctgcctgccataactaaagataatgctactgccagcactttcttcatctttttcataatgatatacctcctcaaattgtacacattgtccgtattattgaattatttcgatcaaatttatacagacttcatgcatacattatagtactttaaagttcaaaaatcaaccctattaatgctttaaagtgaaaaattcaagagatatcagatatattgctgtcttgcaacatcaataattccccgggttgtaagccgcagttccggaatcaccggcaatgacataaaggacagggtcataaacggatcaataccttccgatacccctagcacagctgcctgcttcttggcattctcaagggcatcattcacttccgtcagcgatttgtcgctcataagcccggcaattttcagaacaacttctcccagaatctgaccattcttcacgacagcgatcccgccgttattctcaacaatccggttagcggcagcagccatatccgcatcgttgctgcctacaacaataatattatgggaatcatgtgaaatcgatgtggccacagcgccttctttcagtccatagcctttcaaataaccaatgccgatatggccggtatgacgatgccgctcaatgacagcaattttcaggatatccttcgatatgtcaaccgccgacgcatagccggcatctgttgtcacaatttctcccggcaccatgccgatgacgcccctcggccgatggtcctcaaaactatccgacgttaatctgtcaagattaaatgtatggtgtgctttatccgaaagccatgcatccacctccggaaccggaacatcttcaagctgtccgtcatgataccacacatgtcccttgattactgtcatctccacatgcagattctgaagattgtcaaacacagcaaaatccgcctgatatcccggcacaatcgcacctcggctcaccagatgaaaatatctggccggatgatgggtagccgccttaatagcaatgatcggatccactttatatttttggactgcctcacggataatggcatccatatgtccaacatgcagcagatcattcggatgcttgtcatctgtacagaacatacaatgctcatagtactgcggcaccagaagtccggcaagagctctcagatttcttgctgccgttccctcacggatcatgatatactgccctctgctgagtttttccagggcttcctccatggatgaacattcgtgatccgaataaaccccggaggccacataagcattcagttccctgcctgaaagtcccggcgcatgaccatcgatcctgcaatgatacttgtgtgcagctgcgattttctgaaggacttctgtatccccctggatcacacctgtatagttcatcatctccgccagtccctgaactctgtcataatcataaaaaggatcgatagcctgataatccagtcttgccccggattcatcaaggggtgttgccggaacacaggacggcagcataaaccgcacttcaaccggcaggccctccgtcgcctggatcatataatcaataccgtctgttcccagaacattggcaatttcatgtggatccgtgatcaccgttgcagtgccatgaggcaaaacagccttgacaaactctgacggagccaccagactgctttccagatggatatgcgcatcaatcaaccccggtgccacaattttgccctgcatatcaagttcctccacaccatcataatgcccaattcctgcaatgacaccgtttttgactgcaatatccccctgtgaaagttcattggtgaacacattgacataaacagcatttttcaaaacaagatctgctctctctcggcccatagccacattcatcaactgctgtttaacagctgcttttctgttgatcacactggtataactttcccttgatgacatccaaacaccccctgcaattgattgatcatgtatcgtgaatcgacaccaaaatcttccctgaccaaaaatgttttaaagcgcttctcccaaaaacagatagtgcggcatactgtcttgctccggcacagcaacacttccgtgaatcagcggtctcaggtaacgcaccatctcctctgtcacatcattgcccgcttcattgatccacgctgtcgggatcttcttctctgcattggcaatctgctgcacatctgccccatcataaataacctgatacggttcatcagaaattctgcagacaatggacatctcaccgcttttgccttccagtgccagagcaaccccttttaaccccagctgccagctctcctcgatatctgtggccgacgccatgtgggcagcacatctctgcagcacattaatctctactgagcggaccttgcatccgaatttctctgctaccagtccctcaagacatttgccggtaccacttaatgtggcatgaccaaaagcatccactgcagctgtttctgcactgatgtaatgcccatcaccatcccgaagtccctctgaaacagcaataacgatatgctctcgctgcttaaactgcgctttaatatcttctataaactgttcctttgaaaaaggatgctccggcaggtagatcagatgcggtgcccggctgtaactgtttcttgccagcacactggctgccgtcagccatcctgcatctcttcccataatctccgcaatgagaacactttttgtattataaatataggtatcatgggccatttcaagaacagatgctgccacataacgtgcggcagaaccaaatcccggcgtatggtcagtcaccaccagatcattatcaatggtcttcggaatgccgataactttcacatccatctggtgttccttcacataccggctcatcttgcctaccgtatccatagaatcattacctcctatatagaagaaataatgaatatgatatttgcggaaaatattgataataatgtcatattcacttgaatcctgatcgacatctttcaattttctgcggcaagaaccaagatacatggccggtgtcagcttcagcacattcagattctcttcattatgatcaaaaatatcagtaagattcacaagtcgttcatccatcagcccctcgacaccatttaatgcgccataaagaacatcaatttcatgactctcaagacagcctttgatcacacctgcaagactggcattaatagccgttgtcggaccaccggattgggcaacgattgcatttttcatcatcttcactttctgttcctccaaaaataaatagaatttttctgtttaaatcacaataaataacatgttaatttttctgtatcataacatttatcacctgaccttgtcaattttctgacacctccccctaattattctacaaaatctggtaaattttatgtagatttaatttgacttcctgctataaacaggtataataggtatgataactaaatttaatttttaatatatattgaggagggactttatgccacgtcatttattaaacccaatggacttttctgtggaagaattggatcagttaatggacttagccgcagatattgaacacaatcctgccaaatatgcccatgcctgtgaaggaaagactcttgctacttgtttctatgaaccaagtacacgtacacgactgagctttgaaggtgccatgtatcacttgggcggtcatgttctgggattttcttccgctgcttccagctctgcttcaaagggtgaaagtgtttctgatacaatccgtatgatcggctgctacgcagatatctgtgcaatgcgtcatccaaaagaaggtgctccaatggttgcatccatgaaagccaagattcctgtgatcaatgccggtgacggcggtcatcagcatccgactcagacaatgacagaccttctgacgattcgttccttaaaaggtcatctgaataatctgacaattggtctctgcggtgacctgaagtttggtcgtacagttcattccttaatcgaagccttatcccgctatgaaggcattcgttttctcctcatttcccctccagaactgcgtgtacctgaatacatccttgagatgctgaagcagaagaatattccgtatacagaagttcagagtcttgatgatgccattagcgaactggatattctctacatgacacgtgttcagcgtgaacgcttcttcaatgaagatgattatatccgtatgaaagactgctatatccttgataaagccaaaatggcccttgctaaggaagacatgctggttcttcatccactgcctcgtgtcaatgagatttctgttgaagtggatgacgatccgagagcagcttacttcaaacaggctcagtacggtatgtacatccgtatggcactcatcctgacattacttgaaatcaaagtggaggtataattatatgttaaatatcagtggattagacaacggtatcgttttagaccatattcctgccggtatgagcatggaaatctacaagtatctgaatctcggcaaactggacagccaggttgcgattatcaagaatgccagcagcaaaaaaatgggcaagaaagatatcatcaagattgcaggcggccttgacagtatcgatctcgatgtcatcggtttcctgaatcacaagattaccgtgaacatcatcaccaacggcaagatttccgagaagaagacgcttcatctgccaaagaaactgacaaatgttattcactgcaaaaacccaagatgtattacatccatcgaacaggaactgccgaatgttttccttctgacagatccagaaacagccacttacagatgtaagtactgtgaagaaaaatatacaaaataatcacacataaacataaaaggacacactgtatcgattcatcatcgttttggacagtgtgtcctttatctttctgcttatccgatctttgtatcatccggtcactctctctatcagcattccaatatacgcatcttatgtttgcgctgtgtctaattcatcttttctaaacagcaaaccctctcgatacacaattctgccctgagccatcagatcgatatagcgtgtccaagcactgtgagcaataatcaccatgcttaacccttcccgctgattaatatgcagtgttttcatatatttcgccagcacttcctctctggtcatcggtctcgtcagaacttccagcgctattctggacaactggtgttctttggcaatattgtctgtgacaattttgtccatggaggctttcttctcaacggactgatgggcaatcacatagatctcataattcaatgaccttaccttctccatagaagccagagacttctgtacatttgccatataaggaagcttcgaaacgttcaaaacatcctctgagacaatggcatcaccaagacagcagataccatccggtgttacaacccccacatggcccactgaatgaccttccagcgaaatcaattcaaagatctctccatcaatcataatttccggccgcttcatgtctacacctatgatatgaagtttctccggataatacacagcctgcgcctctttcgcatgggcagccgtatcaaatcccattgagcgcatcatatcttcaggcgatgcaatcgcatcggcttcatcctttgatgtataaaaaagaatatccgggaacttttccaacagtaataaatcattcgccacatggtcaatatgtacatgggtatgaataacggcccgaacacgccagtgccgctcatccaacagctccattaaacgttttgattgaattggtcccgaatcaatcaggaccaattcattctctgtcaaaaaatatcccggaacaaaggcattgccgatggatacatatcctgttttttccgtcagttcatgccatttcatcttataatgttgcatccataactgctttgatcgtatgcatacgattctcagcctcatcaaaaacaacagactgtgcagactcgaagacttcatctgtcacttccatctcactgataccaaacttctcaccgatctccttgccgatagttgtcttaagatcatggaacgccggcaggcaatgcatgaagatggctttctctcctgcattctccattactttcttattcacctgatatggagataattctttgatacgttttgcccagacttcatccggttcacccatagatacccagacatctgtatagataacatctgcaccctttgtacctgcttctacatcctctgtcagtgtaatactgccgcctgtctccttggcaatcgcttcacactgtgccacaatatcagcatccgggaagtattccttgcatgtacatgctgtaaaatgcatacccattttcgcacaaactaccatcagggaattgcccatgttgtaacgggcatcgcccatgtatgtcatcttgatacctttcaggtatccgaacttctcacgaattgtcataatatcagccagcacctgtgtcggatggaactgattggtcagaccgttccagaccggtacaccggcatacttcgccaaatcatccacgatggactggtcaaaaccacggtactcaataccatcataaatacgtccaagtacacgtgctgtgtcggcaatgctttccttcttgccaatctgtgaagcggacggatcaaggaaagtggtatgcataccaagatcattggcagccacttcaaaagaacatcttgttcttgtactgttcttctcaaaaatcagagcaatattctttccagggtgattcaaagtcggaattccctgtttcttctttgccttcaattcatctgcatgatcaactaaatataaaatctcttccggtgtaaaatcaagtaactttaataaatgacgtccttttaaatccataacaatacctctttatctttctagtataacttcttagttttaacttatctcattttatctgatcagctaagccatcctattaacaaagaacggctcaaaattgaaactgtgtataagtatacactcattttttgaattatgcaagtgttattcattaattttgtaaaattatacatattttaattgatataggcatgttttatgcaatacatatgcataattaatcgtttctatccgggctattcgctgtccatgtccttcaatcttcattttcctgtgccatcaaaaccattttctcaaaggactgtgcaaaccgctcatcatcctctggtgttctcttccttggtcctttcatgtggctcttatgtgtacttcttctggcttttttgttcaaatggcgttccatcaacatctgatcaatgttgtcattggtgtaccatttaccggattgatgaatggcatacgctccttttcccaatgccattgctgccacaccataatcctgagatacaacaatatctcccttccgacaaatactgatcagcttataatccaccgcatccgctccggctccgacaacaataactttgctgtaaccagatgataatacgtgatttgtatcgcacagcaatgttaccggcactgcatgcatttttgcaactttctctacaatagcaaccaccgggcatgcatccgcatcgacaaatatctgcattacttttttgccccttttcctctaaattaacattttatgaaaataaactcaactgctcatattcggcctgtctcttcagcatcaccggttcctgacgcagaatgacctgcatcttttcattatcaaaccaatcttccatctgttctttttccaaaatcaacggcattcgatcatggactttgatcattgattcattcgccgcagtggtcagaatcacaaatctccgctcattgtcaaaccagtcacagaaaccggctaaatatagtaccgacgcatctgatctggtaaatgtgttcttttctcttaaacgattccattcatagaatccactggccgggatcacaatccgatgataccaaataccattactgaaagagggcttgtccagaactgtttctgctcttgcattaatgaccagattctttcccttttgcagggggaatccccatttacaaagtgacagctgcaagccatgctcagttttctctataatcggtgctgtgtttgttggcaagatatcaccttggaactgttctttacagattttccagtctatgtcaaaactatataccacattaccaatttcatccagccagttagtatcaatataatatctgccgcacatattggttacttcctttttgtggttcatctttgccttggattatccctttataataattcatccatgcaatattacaaaaaagtattctcatcgcatcaaccttcttttcccttggaaaacggactcagattaataaacagctctttcaattgaatcaacaatccagctatcttcatagtcatatttaaaataggctgctgtattgtaaactgattccttcatatttccataatagatatttaacattctactcacttccctcttaacctaaaattcatatccattatacgttctgcttcatctatttttgtcagttatttaatttatattataagcaagccaaagaatgaagtcaatttatttcacccaagcctgactcgtcccctcaaatatttcaaattctgaacaacgtccttagtttatccaccaaaatccgtaatacatttaaaattcttttctcttcctgtattgttttctcctcaaccacttccgactctatctatacaatattttctttctcagccaaatctactgctttcagtttccgataataaacataaaacatcgatgccgttgtgcacacggcaatggtatcagcaatcggttctgccaggtaaacgcccatgacaaccaaaaatcaccttcaaactatgactccattatagtctgaaggtgattctgttaaaagtaattatctaatttatcagtcactcataaattacatagcggcttatatcttcttacacgctggaatcagcatcccacccactgcatttccaaggctgatcacaaccacgcacagaaatgctcttgtggaccacatctgcgccactgacacatagaacatatccgcaatgcaatgctcgaatccgcaaagaatgaatcctgccacacaaacgaacaaaatcaatggattttttgtctgtttatagccttccactgcaatgtacatcagtgcaccgcagaaaataccaaggataaacaggctgatgaggctgtcatccactttgatctgacacatactctgagccttttcggaaatgccggcaatcctgctgccaagcacccccatggccgccagccatgtaccggccagattacccacccagataatgaccagatcaatgatataggcttttggctgttccaccgcatagccgactttgcccgtgaacaggttcagaccatgcacacagatagaatacagccccgccgtaaacatcaacgcccccacaatcttattttccaaagataaaaacacaataccgcctattccgatggcagcacccgccagcacagccagggcaaataatctcacatactttctcatactctgtacctccaaattctcattgaatttctgtaatgctccggtgtcaaccaaattcacctgaaatcgtcaactgccccaggacttcatgccactccgcctacaagcacggactttgacctgttgctcgcgtaaaaaaagccggccgctgagcatcactgcccagacggtcggcattccaatccattcatacttcctgtggtcaattccacttccgtcagtcgtataaactgactttatcatactgaaacttcacccggttgtcaagtcattttctgctttttacgcataacggacattgatgtttaattacattgacatggcaattcagtaaattcagcaggctttcgaaatttccagccatagtccaattaatcatccggataacaattaaaccagcaggcttttcagcactttcacacagccctctattcccaattctccggaattcagcacgatatcataattgcggtaatcatcccatcgcttcatggtattggctctgtaatagttggccctctttttgtcatatttcttgcggacaaactccatccggtttggagaaatctgataatcctcctggattctcttctgcttgaaagcatcatccgcatgaatgaatactttcaccacacctttgcggtcttttaaagcttcactggcacagtgtcccataaacactgcagaaccattatgtgccagactttgaatagcagcctgctctgccagataaaccttgccttcatccgaaagcatgttcatatcccctgactgggctttgctcatcacaaacaccgtatagagaaagctgttggtcacaccctcctcatactgttcaatctgttccacagaaatatcatatttcctggcaacacgctcaagaatttctctgccgtaacatggcattttgcattcttttgccagcaactcaccaattctggtgccgccgctgccaaattctctttctattgttatatactggtacttcatccgactcgccttccttcttatgctgccttatgacgcctgatcaaactggctgttgtacagatccgcatagaaaccgccttttgccagcagttcctcatgattgccgctttcgataatatcgccgtccttcagtacaaggatcaggtcggcatttttaatcgtggacaaacgatgagcaatcacgaaagatgtacgattctgcatcaacgcatccatggctttctgaatctgaagctcagttcttgtatccacggaacttgtggcttcatcaagaatcagcattggtttatccgcaatcatggctctggcgatagtcagctgctgtttctggccctgtgacagactcacctgatcattaaggatcgtatcatagccatgcggcagtgtccggataaagtgatccaggcctacggctttacatgctgcctctatcttctcttctgaaacattctctgtattgtacaccaggttttctctgactgtgccctcaaaaagccatgtatcctgaagcaccatgcagaactgggaacgtacttcttcacgcttcatatcccgggtggaaataccgtcgatcttgatatcgccgctctggatctcatggaaacgcatcagcagattcaccagtgtcgtcttgccggcacctgtcggaccgacaatcgcgatcttctgtcccggttttgccttggctgaaaaatcatgaataatgatcttgtctgtatcttcataaccgaatttgacatgctcaaaatccacataaccttctgctttgccaagcttctctgttttatcactttcatcggacatttcctctgccccaaggaaagcaaatacacgctcaccggctgctgccgcagactgtagggactgagttgcctgtgcgatctgcgcaaggggctgggtaaacaaacggatatacatcataaatgcaacaatgacttcaaatccgatatagcctttcattgtcagcacagcccccatcacgcagacagccacataaccaaaattgccgataaaggccatcaaaggctgcatcagaccggaaaggctctgtgccttaaaagcgctgtctctcaggttattattcagttcatcaaatacttttttggcatttttttcaccgttataggctttgacaactgtatgtccggaataaatctcttcaatatgaccatttaatgcaccgagatttgcctgctgccttgagaagtatttctgtgaatgacttgtgatcagtgacatcagtccgaaaccgatcatagttgcgatcactgctgtcagcgtcatgatcacatttgtcttaaacatcatgattaaagacccaaagaacaaggctaccgctgacaccaggttgccgatactctggttcatagactgagaaatcatatccacatcattggtgactcttgaaagcacatcacctgtagatgtcttattgtaataggccatcggcagacgattgatcttgaccgaaatatcgcttcgcagctgctttgtcacattttgtgtgaccgtggccataatgaactgctgtccaaaagacaaaatcgcactgcccacataaaaaaccaccaatgtcagaccgatggacttgacacgttccatatcaatacctgtcgctatgccctctgtgatcacctttgtcagatctgacaatttatccggaccgaggattgtcagaatcgtaccggccacggcacagatcagagcaacaacaatcactgccagataacgtttacaataacggatgatcttcatccatgttcctttaaaatcttttgatttctctgcaggacgtctgcccatgccagggccccgcatcccacctctgttatttctattttccattatgccagttcctcctttgaaagctgagagaaagcaatctgacgataaacttcacaattcttcatcagttcatcatgggtacccattcctgcgatcctgccttcatccagaacaatgatcttgtctgcatcgcggatagtgccgattctctgtgcaacgatcaatcgggttgtatcaccgcacttttcatccagtgcctttcttaaaattcggtcggtcttataatccagtgccgagaaggaatcatcgaagatcataatctccggatgacggcaaatagctctggcaatagaaagacgctgtttctgaccgccggagagattcgaaccgccctgggctacaaaaccatcataggtatccggcagtttctctacaaattcatccgcctgagctgtatggacagcatcgataatgtcttctctgtccgcaggcttgccgccgttttcaccataagccacattgcctgcaaccgtgccggagaagagaatcgccttctgggatacataaccgattctgtttctcaatgcttcctgtgtatattctttcacattcatgccgtcaaccagcacttcaccttccgttgcatcataaaatctcggaatcaggttgataaccgtactcttaccacagccggtagaaccgatgaaagccaccgtatctcccttatgagctgtaaatgtaatgtcttccagcacattcttctctgcatccggatatttgaagctgacatgacgaaactctacttcaccggtcatacccgccttggcttctgtcttcgcaccatcctcaatggccggttctgtatccagtacctcattgatacgctttgcagcaacggatgcacggggtaccagcacaaagatcataaccaacatcatgaaagccatcacaacctgcatcgcatactgtgaaaagacaatcatatccgagaataatgtcagcttatcctgcatacccgcatcattgatcagataagcacctacccagtaaaccgccagtgtcagaccattcatgacaagcatgatacccggcatcagaatcgtcatggttctgttggcaaaaagctgtgtacgcttcagttcatcattggccttttcaaacttggtctcctgataatcctccgcattataggcacggacaacacgaagccctgtcagattctcacgcgtcacccggttgatgttatctgtcagaatctgcagctttctgaacttcggcattgccaccataacacagattccgacaatacacagcagtataataactgcgatgcctgttgtcgccgtccactgccagctctttccggcaatcttacagatggcccacacagctgtcaccggtgccttcagaaaaacttccaatcccagcaccaataccatctgaacctgggtaatatcattggttgaacgtgtgatcagactggatgttgaaaaacgtccgatctcttccattgaaaatgactgcactctgttaaatacctgtcctcgcaggttggcagaaaaatttgctgaaatctttgccgcgcagacagcaatacaggctgccgtcaaaagtgagcccaccgcacagagcagcatcttgcctcccgctgcaagtatatctgccatggcacttccctctgtctgaacaagcactgtcatgtcggacatataatccggcatggtcaggttcagataaacctgtgccagaatcaaaagaaaggcaagtccagccagtgccatatctttctttgtcaatttctttaataatttgatcattactgcacttctcctttgatgtcattgcatatttctgttaaaacgtattcattatcagcactcatctaaccagagtgccagatttaactgaataaaaatacttcagtgctgctgaagtattttatcaccataaactgtttgatattaaactgtttatttttaaaccattatagtacgaataaagaatatgtcaaggctttttatattttttttagattttttcttttccggattatacagatgcctcatcaatcattctctccatattcgccattgcatgctttaatactttattgaaaatcgctctatcctctgcctgaataccggacatgatctgctgatgcatatcatcccatatagcattgatgcgcctcaccagctcttttgcctcctctgacaatatataatgcatataacgcctgtccttcttatctggcatgctctccagataatgcatggtacacagatgttccagggtctttgaaatctgccctttattcaaatcaagataacgatgaatatctgctgccgtattccgctcaccggacatagccagaaaacgcagaatctcgatttccacccgcttcacatcatattcccgaatgatgccgtccatcttcttgttcattagctgtttgaactgtctgccacggtgcatcatgtttaactgttcttccataatacttcccctctgtctgattttcacttattcaaaatacactcatcgtctgatctgtattaaaaggcggtgagtatttatgatctgttatattatacaccgtttccggtggttttttcaaacttttgtcgggagaatttttaatctgacagatacgctgtgacaatatctttgtcaacctgcgccccaatgacatcataaaccggctgtgcagcctgttaattgttcaatacagcctgttgattcgctgtgaagcagacttacagacttttgtgaagcagatttaatacagtattcaggtcgttcacacccatctgtcccggagcagaggctttgcctgctgcaccaaatgtcagtgcagaaccgaatacttcaccgcaaagacggctgatcacacctgtacctgccatagacatcgtaatgatcggtctgtccgcatacagtctgttcatctcttctgttgcagaaagcagtgtcagtacatccagtttgctctgaggcatcaccgcaatctttggaatgtccgcgccaagatcctgcattttgcgaagacggccaacgatatcatccttatccggtgtcttgtcaaaatcatggttggaagcaacaactttgacgccgcaggcatgggctgcttcaataatctctttcaccacttcatcccctgtaaaggcttccacatccaccaggtccacattgcctgtcgctgcgatttccttgttcagttttgcataatctgctacttcaatggccttctcaccgccctctttggatgtacggaaagtaaaaagaatcggtgtatcttttaaaacctggcgaaggtctgtcagtacatccttcactttttcaatatcgaaaacattttcaaaccagtctacacgccactcaacaacatctaccgggatattttcaaatgttttagcttcattgataatgtcttcttttgtcacaccgacgattggcacacagattttcggaataccttcgccgattttaatatttctaacttctactgctttcatactctcagactcctcttttttattgttctgtcttcgctaaaagacttccgtatctcacattaacaaaaactgccagcagcacgccgataacggtaataacaatgttcagcatgatcacctgcatggatgacattttcgctgccgcacttaaaattgtatagttgcacagactggatgcgatcatgaccagactggtaatggtccccttgatattcgggaacagatcattctctgttgctgttgccatctgaaggacaccgcctgctgctgcataaccgatcacaaatgctcccacgaagcagatcatcggtgttttcaccaggtaaaccaaaaccaacatgacaacggaaattaccggatagatcaccaggaaacggacctgtttgaactccgccaaggactgctgccacataggccacctgaatattcggtgaaaatgcgatgcctataaaaaagataacataggatgctgcaccaatcaacactgaaattcttcttcccagcttatcagacaaaggccttgcaaaaggaagggaaacatcgaaggtaccgaagaaggacgcaatattctgaatgtgctggccaaacacgattatttgtaaaaactcataaaaatcccctatttgatatcccccctaagaaagaaacctccgctaaaacaacgcgcacccgcacgaaacgttttagcggaggtttccttatcagggggatattttattttgtcatctattattagatcaactgtcttcatgattcaattttggctttaaactaattgctttaagctatttgcctgtttttataagcaatggttccttctgccaggcatacagcggcgaggatgatgttgatggcaaatacaggttgccagatgttatagatgtctttgaccatgtttgtcataatcaggaatactggcatggcatcgacgataagggccataaagccgccgaaaaatattcttattatcaccggcaggccccagcatgctgcagagatgatgacggctccaaatgaactgttctgatgggcagatacacacagggtaatagcacacaatgataataaggcttccaatgcaagcatgagtaagactgccagatattttgaaaacatcaccgactgatgcctgatgctttcagacagtacaagtcctgcgatgttattgaatccatttaacccatacacaacctgacataaggccaggtttatcaccgcaaaccacagaaagatagaaattgtaaacgtcaaagcagcggctatttttgccatgacatcctttcttcttccctcttctgtgctgaaaatcagtggcagcattttcgtctggctctcctctgcaaaaatagttgacacactgcaaataaccagtatacttcccaatatcaggccaaactgcagcatttcaacaaatattttccagcctgttgtgtaagtcagataaggtgttatccccagtttttcacagttttcccccagttctgtttccgcaatcatatatctttctgttggagtaatgccgttttcccatgccccattggtaaaatatcgtgtcacaaaatcatttaaaaagttcccgtctctccatcccggcatattttcttccaacttggatggcagaccatatttttcaacaatttgatgaaccttttcatctgtcagctcgccttcaaattctttcgtgattttcttgttcatcttcacagcctcataaccggaataaacgcttccatccactgcagccatttccccgcctacttctgcaaaccaaaaataagccaacaacaatgcggtagcggcaaatagtccgattctaaatattttgttgtgatagagtttgtacaattccattctataaagccgcattttacgtttcctccgctgactgtgtttcataaagataggcatcttcaagagtcccctccagaagttctgcctcccgcatgggctgtttttctgaaatcactcttaattcgatattttcaccattgcttctcatattgcttacaacaaaacgctgcccaaggcactcggcttctttttccgaaacaatgcatttccaaacgtggcctttcactttctctgttagctccgcctctgttccttcctgaatgagttctccgtttttcatgattaaaatgcggtctgcaatatactctatatccgacacaatatgagtagacagcaaaacaattctgtctttgcctaaggaactgatgatattgcgaaaacgcactctctccttcgggtcaagccctgctgtaggctcatccaaaaccagaatttccggattgtttaaaagtgtctgggcaatgccgattcttcgaagcatccctccggaaaaagttttcagctttttcctgcgcacatttttcaattctaccatagtcagaagttcttcaatccgcttttctgcatcatctttcggcaatgcttttaaagccgccatatacctgagaaaacgctccgcagtaaaatcaggataaaatccaaaatcctgcggcaaatagcccaggagttttcgatattctgctcccataccggaaatttcaagattatcacaacaaatctttcccttcgttggctgcataacaccgcaaatcaatcgcatcaatgttgtctttcctgccccattttctcccagcagaccatataccccatttgtaaatgtataatccacttcacggacggcatctttatctttgtatcttttccaaacatccatcaattttaattcatgcataacacatcacctttttccattctattaaatagcctttttatctgaatgacaaataaaagtagtgacagtataaagactgctgtccatatccggttagctgccgtaaacataatgcccggaatagccccgatgacaccatagccaatggacatcaaaaagccactgatgacaaatagaaacgaatgcttttttcctgtctccattgacaaaatatccagggcaatcatccccgacaacagataaggtgtcagaatataaagccccacctgcaataatccaacacgccagaagccattcaaataacctgccagcaaaaacagcaccacaacattgaccatcccggatattaccatccatgcagccacacattgctttgtattaaaataacagcttgctcccaactctgccatttttccaaaaaacatcttatcaatcacaccaatggatgtgatgcttaaaattcctgctcccgccatacacacggtgataatttcattctgactcactccggtatattgcagcaccgcaataaaaataatgcccagacagataaggccgccataaatatagaaaaataatttatccatatactgaaattgctgaagcagaatatttttgatggacatcctcatctcaattctccgcttattgattttctgcttctccatctccatcatcattgcctgatgagttttttgctttctagcttcatcaatatgtacctgcgcattcgctcttacaaaaagattttttatttcactatctcccatcgtcatgctccccctccatcatccttttcaactgactgatacctaatcgaaaccgtgactttgccgtggacacactgcatcccatcatatcggcaatatctttaaacttcatttcttcatacatccgcagaacaactacttccctgatatccggcgaaagcgcctttaaaagattctgcaaataaatgatatcttctgtttccgttatctgatttcccggtttcggcagcttatcaaacacttcccattcaactgatgattctatatctttcttatcccgaaaataattgaaacataggtttcttgcaatcgtcagaagatagcccctgagattctggtgatgataagaagttccatacttgataaatttcaaaaaactttcctgcgtaatatcataagcatcctcctcatattgaaccatataaagacaaaaacgataaatatctgcataatatcgctcaataatcaggcctgctgcttccttatctccattatgcaatttttgtactaattcgctgtcttccatagtgttttctcctaaccaaattcccgtacctattatataaccattataaaacagaaaaagttcactgtgagcaaaaaaacagacagctaaattcataactgcctgctaaaaatattttcctttttctgcctcacccatgtaagctcatccattcatccataaaatcccttatttcctcatcattttgctatgcacatgctctcgtctatccactcatgaatatcttgctccgtaactttcattaatcgtgcaattctactaatatccataccatcttcaaccaacaacattgctgtttccttcctggcttttaactcgccacttttctcaccttcataataaatctgttccatttcctgacacataaattcaacccctttctgagtttctttcaactcatatactcggtctgcaagaattctgctatacatatcttctgcctttttgcaatggaaatcatgcattaaccgaccaagttccgtatcttcctgaattttcgaattaacatatataatatgtgttccatcaccgaaaaatccatcaacttccagaatcactctctctacatgatatatggccaatccataccctaatatatcatttctcgtaataaatataacatagttctccgtcaattcatcaaaatcctgtcctggattaagcatattcatgtccattaacccactgttatatcttgcccgattaggtgaagccccttcattctcctgctgaatttcaatattaaaatactgcccatccgcatctctggcaacacaatccatgacagcagaacgcccttgaagattcttgtaatctttttgaataatatgttctgcaataaataatttgtgattttgcaatataatctgcaaaacatattccagacattctttcttcttaaatacatttctcatgaaaatatcactcataagtgtaaaattatcaataatattcttgtatctttcgtaacgtgctttcagctccccttctgaaatggttcctccagcaaacacgtcaataattcccccattcattattctttttctttattctcttccgttttcccctttatattgctattatatgcaatccgattacaaaaagcaatgcacattcatcgacaaaaaacgacgctgattctacaacgccgttcctcttttcggaataaaaaatttggtcatatctgttttctctaattccaacaatcgtacctttttatcaattccgcctgcatatcccgtcaagctgccatttgcaccgaccacacgatgacatggaatgataatagagacttcgttatgccctactgcaccgccgactgcctgtgcagacatatgatccatgccatgcttttcagccagttgtccggcaatctctccatatgtcgttgtctgaccatacggaatctgcagcaaaatctgccacacttcctgtctgaatgcagatccgatcggatgaagaggcggtgtaaaattcggttcttcgccggaaaaatacacatccagccatcttttggactctgcaagaatcggtgtttcccggacaatatgttcatccggaagtatgttggcaaagtatttctgcccaacaaaccacaatcctgtcagaccgatttcatcagcagccaacaggatatcccccattggtgactgatattgacatgtatataccatcattttcctccatcttacttcttctgtgtcttcggtttataatctctcattcccgaaatagctccgcctgctactgcccacaaatacagactggccacactgcagtaaggactaaaccgcctgcgatacttttcaaacaacttccggtcaatcttgcggtgatgataaaccatacgaagtccacgctggatagccagatcatcatagctgaatatatccggccgctgcagacagaaaagcaagatcatctccgctgtccatacaccaattcctttcagagaagccagttctttgatggccgcctcgtccgacatctgagcgactgtttccagatcaaagacgccctcatgaacctttctggcaaagtccgtaatatattctgccttacgaaaggtcatccccaaagactgcaacttggaaatgtccgctgaaagaatagttacagcattcacttctcccaaagtctccttcatccgctgccagatggttgcctgtgctttcgtagaaatctgctgaccgataatatgatgaaccactgcagaaaacaaatctgtatccacttccctttctatcatccctatctgatcaatgacttctgacagctttttatctttatttcgaagataagttatctcattttcaccatattcaaaatacatccttcatctcccatccacacattctgcacaggccctcttcaatttcttcatccagattattcctttcatccatggccctgcattacacgctttgcagttctaactcccccctatcataccatgaaatattcccttttacaagcgaaaaagcaaacagttgttcttttttagtttcaaaggcaactatttgcttctgcaaaacactataaaaatctattatgctgtcatcaaaaatacgttctatttattcatctgcacttctcagcttatggatcatttcctcgcagatctcaagtgcactcttgccgtcagtctgaacaacgatatccgctgctgcttcatactttgctcttcttgcttccatcaaatccgcaatatactctacattcttgtgaccattcaaaagcggacgttcgtcactgtccttcacgcggtcaagaatggtctgcgggtctgctttcaaaagaacaaccttgccgttcttcttcatctcagccacgttgcgttcacgcatagccacaccgccgccacaggaaataatgacattctgcttggactgcatgtcaatcaacaactgtgtctcaaggttgcggaagtattcctctccataagtctcaaaaatttccgaaatgctcatgccctgctgttcggcgatcacctgatccatctcaaccacatccatggccagcgcatccctcaaaaacgcagagatcgtactctttcctgctcccatgaaaccgatcagcacaatattgtaatcgaagagtttctttccctgaatcttcttgctgttgtagagaactcgcgcataaatatcagcaatctcttcctgatgcacattacctttcaattctatgtccagtgcctctttctgtctgctctcctgctccggctgaagaatctgcatctgattcttctccttcaatgccataatcttctcaaccacatcgaatcgtttcatcaatatatctacaagctgagtatcacaggataaaagttcctgccgcaataaatccagttccttcatgttccgctctccttgtttctgtagtttaacgctttaagttattacattgtaccataaatttacaactaaagaaacctgtaattgcatttatttattttattggttatcctgcgcagttttcatacgaactacaacattcacaatcatcatctgaatttttctttccaaaaacaggacccgcttttgcgggtcctgataaaagattcatatgttatgcttcatcaatggctttgccgatatcatgacgcatatatttgttgtcaaattcaatccattcggttgctttataggcattagctcttgcttctttcagcgttgtgcctttagctgtgacaccaagtacacgtccaccgtttgtcacaatgcctttttcattgcgctttgtgcctgcatggaaacaatagtaaccttcatccgcatgaaatttctcaaaacctgtgatcggataacctttttcgtaggaaaccggataaccatcagaagccaggacaacacaaactgccgcattgtcttcaaattccagatgcttttcagccagtttgccgtcgatgcatgcctcaaacatttctaccagatctgtcttcattctcggaagtacaacctgtgtttcaggatcaccgaatctggcattatattccagcaccttcggaccgtcttctgtcagcatcaaaccaacaaaaaggatacccacaaaatctctgccttctgccttcatcgctgccatcgtaggcttgaaaatatgctccatacagaaagcattcacttcttctgtatagaaaggacttggggaaaatgtacccataccgcctgtatttaagccctgatcgccatcttttgcacgtttatgatcctgagcagatgtcatcggtacaatattagttccgtcacagaagcaaagggccgacacctcacgtcctgtcataaactcttccacaaccatctgattgccagctgaaccgaatttcttgtcttccatgatctctttaacaccggcgcgggcttcttcaagattctggcagataagaacacctttgcccagggccagaccatcagcctttaatacgattggcatcttggccgtttcaagataatcaagggctgcctgcggatccgtgaaattctcataagcagcagtcggaatgccatattttttcatcagatctttggaaaaggctttggagccctcgataatggctgcattcttacgcggtccgaatactctcagtccttctgcctcaaaagcatccacaataccgcccaccagcggatcatccatgccgatcaccgtcagatcaatggctttttcctttgcaaaggcaaccagcttatcaaattccatggcaccgatcggtacacattctgcaacttcttcaataccggcattgcccggtgcacagtaaactttatctacaagaggactttctgcgaccttccatgcgatggcatgctctcttccaccgccgccaacgattaatactttcattctgctcatcctttctttcatatataactcaaatatccgccgattccaccaaatcaaaaggcagaatcggcggatgaacctattcaaaatcaactcacaaattccgatacaggattcaaagtcacattgcagacttggagtcttgaagtccactcctctacaaacactctgccatccttcacatgcactttgtcatgggcgatcagatcaataactttcggcataatctgccattcagcctgctccataattctgcgctgaagcacctcaggcgtatcatccgggcgtacttccaccggcttctgcatgatgattgggcctgtatcagttccctcatcaacaaaatgcaccgttgcaccgctgatcttcacaccacgctttaaggcagcctcatgaacatgcagtccataataaccggttccacagaaagacgggatcaacgacggatggatattgatcatcctgtttctgtaggctttgatcatcttctctggcacaaccaccataaagcctgccaatacaatgagatccacaccccgggcattgacagcttccagcagagcatcattaaaaagctcacgatctgcatactgtttcggagaaatacatactgcttcaataccggctttcgccgctctctccagtgcttttgcctttggattattgctgatcaccactttgatctctgtgtcggtgatacgtccatcggcaatgctgtcgataatggcctggagattggtgccgccgccggatacaagtactgcaatctttaacataatgtcacacccttttcgccctctgtcagttcaccaacgatataggctttctcacctgcttcttcaagaagcttcattgtcttatcaacatctgcaggatcaacaccaatcaccataccaagacccatgttgaaagtattgtacatcatctgttcggcaatatcacctttttctgcaataagtttgaagatagccggaacttcgtagctgtctttcttcacaacagcatgaacaccttccggcagcatacgtggaatattctcataaaatccgccgcccgtaatatgggagcatcccttaagcgtcacaccgccgtctttaactgccttcagggctttgacataaattcttgtaggcgcgatcaatgcttcacctaaagttgtgccaagttcatcatagtatgtatccaatgattcctttgtcatatcgaatactttgcggacaagggagaaaccattgctgtgtacaccggaagaagcgatgccgataagcacatcacctttcttcagattctcacctgtgatcagatccttcttatctacaacacctactgcaaaacctgcaagatcgtactcatcctcaggcatcagtcccggatgctccgctgtctcaccgccgatcagtgctgcaccggactgcttgcacccttcagcaacaccgctgacgattgtggcaatcttctcaggatagttcttgccgcatgcaatataatcaaggaagaaaagcggttcaccgccggcacaagccacatcattcacacacatagccactgcatcaataccgatcgtgtcatgtttgtccataaggaaagccagtttcacctttgtgccgcagccatctgtacctgataaaaggatcggctcttccattttcttgatattttcaagagaaaaagcacctgaaaatccgccgagaccgccaagtacttccggacgcatggttcctttgacaaatttcttcatgagttctactgattcgtatcctgcttcaatatctacaccggcatttttataatccatttatatttcctccttgataaaagcactctgattatgattaattgttcgattcaaaatccgttcccggattcttatttcactatttctatctgctattttgttgggtaatcaccgttaaaacatgccatgcagaaaccacctgcggcatccggacatgcagctaccataccctcactggacaggaaggcaagtgaatccgctcccgtcatcttgcagaccgcatccactccctgctcatggaagatcagtttcttctcttccggcatggaagcgccataataacatggatgtgaaatggttgctgatgcgattctcagatggacactcttagctccggcatggcgaagcagctcaactaacgtctgagccgttgtaccgcgcaccatggagtcatccacaaccacaatgttcttgtccttcacctggctcttgatcacagaaagcttcatatgaatctttctgtcaaacaaaatcccttccggcttcaccagattattaccgtagtatttattttttacaaaagcatccaccatagggattcccagtgtatctgcatatccggctgctgctgccagacccgaatccggtacccatacaaccgcatctgcctctgcaggcgcttcctttgccagatggcatcccatattgtatctcgccttgtaaacttcctgaccaccgaagacactggccggatgtgaataataaatatactcataaatgcaggcacgtatcggctgcgccggcataccctggatggaatgcgggccttctgcattgatgaccacaatctccccgggctggatatctctcacataatcaacattcaattcatcaaaggcgcatgtctctgaagaaaggaaccatgaatgatcttccctgccaagtaccaacggacgaatgccctggggatctctgacaccgatcacctttctcggcgtcatcaccagcatcgcgtatccgcctttgagcatcggcataatagaagcaatcgcctcctcaatggtcggataattatttcttgctctggaaatcaacacagagattacttccgccgcttccattgtctggaatacagaacctttcagttccagatcatggcgaatctcctcgatattcgtcaatccgccgtttaaagcaacagccatatgaccgcttgtgtaacggatcacgatgggctgtgcattctcccgggcatccgatccgtcatatctgagaatgtggccaatacctgcatgtccctgaagcttctcaagcttcatttcatcaaaaacttctgtcacaaggccttcatccttcacataggaaaaattaccctgattgtcattcacacagatacctgctgcctccatgccgcgatgctgcatggaaaacagtccgtaatatattaaatgggatgtatgaaagccgttattgtcaaacatgccaaacaaaccacatctgtccatcattttctccatctgcttacatctcctttaaatacgcttcatagccgatatgctcaagcttgtcagccttattcagtaccgtctgctcaagcttgctgctgtatgctttcagtctctcacgcaatgcggcatcctctgtggccagaatcttggctgccagaagtcctgcattctgtgcaccattgatggccactgtagcaaccggtatgcccggtggcatctggacgatagaataaagagaatccacaccgccaagagcctttgtctgcaccggtacaccaataacagggagcaccgtcatagccgcagtcatccccggaagatgggctgccccgccggcacctgcaataatcactgaaaggcctttttcctcggctgtctttgcatattcgcataatctgtccggtgttctgtgtgccgaaacaatcgtcagttcataaggcacctgcaattcatccagtatctctgctgccttcgacataaccggcagatcggaatcactgcccataataatgccaacctttacgctcattcccattacctccgttaaaacttgatctttgaatgcgcatagcgcgctttaaaaagtgcatcttcaatcgtcttatctgtcactgtgatatgccccatcttacggccaactctgcattcctctttgccgtaaatatggatcttcacttcaggatacttataagcttcttccagtccatggacttcagccttcttattcacatttccgataatattcttcatcactgtcgggcgtatcagttccgtactgccaaggggcagtccaagaatcgcccggatatgattctcatactgtgaagttacacagccctctattgtataatgtcctgaattgtgcggacgcggcgccagctcattgacaagcacatgctgatcctttgtcacaaaaagttcgatacagagcataccataggcattaaaagcatgcaccgctttccttgccacatccatggcttcttcccgacaggcttctgtgatatccgccggtaccgttgtctcatccagaatgctgttcacatgcacattttctgccaccgggaataccgctacatcgccgttagtgctgcggcagaccaaaatcgatacttcctttaaaaacggcacatattcttccaccatcaggggcagcctgcctgcgcccagactctcataggcctcgcgaatatcttctcttgtatggatcaccgcattccccttgccgtcataaccgcctgtacaggtcttcaaaatcaccggataaccgaaatagtcacaatcctccaccagctgttcataagagtctgcctttcgaaaatcaggaaccggcagaccatgtgacatcagccactgcttctgatcgtatttgttctgaatatgcaaaagtgtctcactggagggataaacaggacatccctttgcctccacctgctgcagcgccttcacactgatgtgctcaaattcatacgtcaccacatccaccttcgaggccagttcctcaatggctgccacatcatcaaaatctgctacaatatgttcatctgcaatgctgtgagccgggcaatgcagggttggatcaagaattacaaaataatcatccagccgcttagcatcaagaatcatcattttgccaagctgaccgccgccgataataccgatcttatgcatgttaaacgctccttttataatgatatcttataaataagtggatactcttattataaaccattcttataaattcactttttcctaccaaaaaggcaaaattcatcagaatctgactctattgtaaccgtactgagcttttacgtcaatacttaagcgaaaaaaaggaaaggttctttcacctttccttttttatttaaaatgtatcgttgatactatataagcacagcttatatgttgagtggctcattcaatgcttccgtaccttcaaggcagaatttgccctcccgtatgatatctacctgcctgccgtctgcaaagcatgctgtaatggcactgatctcatcgtaaggaatcgtaatatccgtatgcacattaaaatatgcctgttccggatccgtatccctcaggcgggacttctcattctcgcgggcaacaatttccttgccgtctgtattatataccttatgatcttcactatggctgtagcaggtatcgccaatggcaaaatgcggccctgtcttctccataataagaatcggcatcaactgtgtaatgtcgaattttctggccatggcataggccgttgtgttcgtgccgatggcaaattctcccattggcagcgtttcatgattctgaaggagattctgtctcagatacttctgattctcttccctgtcctcataattgctgcagtcggcttcagcaacacagccatcttcaaatcgcaatgaaagatttctgtaattcaatccattcagataaacactgcttacatgcagcgttccatttgtccctgccaataccggacttgtaaaaatctcacccacaggaatattcacatctgcgcagcagttttcaaacaccgtttccttcgccggatcctgaagctgccataaggcaactttcaaatccgtccggttgccgttcataccggtaatatgcatatattccgcgccgtcaatggcatcgatcatcttctgctgaatgcttctgaacagatcattatctagattgttgactttgatcgtctcatccataatggcctcaaaccgatcgccaatggatggcagtggccaggcaatgattgaaaaactgatggctgacgcatcaatatactgattgacaatctctgtcatctgtcctgccatgcgaacagccagcttctgctgtttatccgacagtcggatgttctcctctttagccgccggttcaaagggagtctcaccaaaaacatccatccaggccggaccggcataatcctctgccagatccgcatactgctcataggcagacttcgtcacaccgatgatgcgctcacataaagctttgtcaagatataaccccttatccatgcggtgatcgtaatcatactgcggattagccgagcaggacacaagaccgagcttacccgctgtcttgttaatactatggatggcatccctgcagacaatcacagaaagtcctaatgcttcaaattgccggattgttgaacgaagcactcgctcaaaaccaatattggctcttaactggacattcttcttggctgataagtcaatcttatacagttcaaatcctctcacgtagccattcacaaatgtagctgccatatcgtcgatcaccgactgatccagggtgttcagatacgcagcaatcgacttttcattgtcagaaatatactcgccatactgatacagataagacagatctgtcaaatccgccttcatgatgatatccctgtaaaagctcagggccggatccagcttctcccgggttctccccgtcacagtctgatcactgtaatcactgacataccagtaaatgatctgcaaaatctcatctctttcaggtatacggttctcaaaccggttataaatctctataaacagttcattgatcgctgtcatatctgccagacgcccctggaatgccaacggaatcagacctcggatctccgtgacaagccaggccatcatcggaccataatctgctcccagcattgctgtcgaccattgtggattggcatagcttttctcataaccggtttccccctcccacatctcagtttcaggaagaatatccgcataaaagcaatgattcatctcagccagtgcctccgtggtcagccgttcaaaaccaccgtcctgacgcattttgtagatgttctctacatgcaaaataaaggccgcctgactgttaaaataatcaccaaacggggatgccgccgcatgttccttggcaatcccgcgaattctcgtcacagacagttcaaagcgttcctgcacccacgcctgcacttcttctctatttacctctttcttcactatgctcacctttctcatctataatcgtccgaattccagctgaaaatcctaatcttccgaccgaaacaatgtctgccctacatgataatagacaaacaacctgccaaaaaaatcaggccatgaatcataacagacgccagattaatataaaaagcgccatgcaccatcgtaccataagcttcgttatccttgcggagctgaacagacaaccagagtccaaataccgccgcaagaaggctcaggtatccgattccgccgacaaatgccggaagattgccggctttaacaaaagatgcaattgtaagaacggccatgcagatcaaagacgcaatgccaaaagctgatgcataaatgccgcgctttgtctgacgtttttctattttgatgaaactgtatatattacgcgccattccattttctccttactttattgattatgtaaaacaaaagatatccgaggataccccctgaagtattcaaaattaaatcatctacatcaaaggatccaacccttgtcagcagctgtgtaatctcaatcatcagactcagtaaaaatgtcatgcccaacatacaataccattttctgagcctcaatcttaatatgggcataaaaaatccaaaaggcataaatgccagtacattaccaaataaattggcaaggaatgcccggattcctacaacatctctgtatatataaaatcttcgaatttccttaaatgggataaaattatatctataataggaagtcacaacatctcttccataatcttcacttaaaaagcatacataaattaaaacagcgatatacaaaataagcagtacgaaactgccgaatttgatacaccgctttgtctgtcggctcacgcaactccccctgcctgaaaaaatggcaccacggctgcactgaccggcagccgtgatacatttgcaattatttctgaaatgatttacattaaatcagaatgatgtctcaaaagccttgctccattgacaattccgataataccgagaaccagcccgccgatcacagataaaattccaaggacaaggctgcatgcaccagtctgacacatcaactttgatatcttatcttctattctcatcttcgctgtcctttccatgtctacgctcgtatctaaatgatacatcgatccgatgtccgccgacatccgatcaaagtctactgttcctttgcaccatactgttcatagtatgcatcaatggcagccttcagcttgtcatcaatcacaatcttcccattacacggtttattatacaggcattcaacaacctccgccattgtaacaatggcatttgtctcaaagccatagaggtctttcacttcatccagggcacacttcacaccgcccttgccgacttccatacgatccagagaaaccatcagaccgacaatcgtcacatctgctgcacccttgaccttcggaacagtctcttccatggacttgccggatgttgttacatcttcgatcatcacaacacgatcaccgtcctttaaagggcttcccaggaaattgcccttatctgcgccatggtcctttgtctccttacggtctgaacagtaacggatctccttaccatacagatcactgaaagcaatcgctgtcacaacaccaagtggaatacccttgtaagctggtccgaacagtacatcaaaatcgtcaccatactttgcataaattgcctttgcgtaatactgtcccagacgctttaactgggaacctgtcacataggcacccgcattcatgaaaaacggagactttctgccgctcttcaatgtaaattcaccaaacttcaacacatctgcttccaccataaagtggataaattcttctttgtactgttccatatctatattctccttttcgtgattaaaaattcactcattcatctctgtctttttcttctctgttattatactcaacttccaacgaaaaatcaaccaaaaacatacctgtccagtcgttcaaaagcctccgtgacacgacacttcggcagcgccagattcattctgatatgatgttccccatggaatggacgtccatcctgccagccgacgcccacattccagccggcctgaagcagttcatccatggattggccatgatcttcacaccattgtgtacaatccagaaaaagcatataagttccctgaggctttgataccgtcacacccttaaaatgtgctgcaatgtaatcacaggcaaatcgtacattctctgttaaaacctgacacagctcatccacccattcgtaaccctcctgtttataggcaccgatcagtgcatgcatggacaaaacattcatctcattgtaatgggatttactgccccttgcctccactctgtctctcaatgcttcattatatataatatgatagctcccaatcagacctgcaagattaaatgttttgcttggtgcatacagggccactgtgtgttcccgggcataatcatttacctgctgtgttggtatatgcttttgtccatccagtataatatctgaccagatttcatctgagatcactgtcacagcatattgttcatataccgccatcgccttttccagctcccactgttcccagacacggcccgtcggattatgaggtgaacacataatcgcagcatggatatggtacttcctgatcttcgcttccatatcctcataatccatcctgtaaatgccctctgcatccttcttcaactcactgtgtatcatcttatagccattgttcttcagactggcggtaaagccaatatatgtcgggctgtgcaaaaggaccgcatcccctggtgccgccaggcactgcagtgccgaaaggatccctccgaggacaccattctcatagccaatatactcttttttcagtccatttacgccatttcgtttttgatgccatttgataatttcatcaaaataggtatctctaggtgcaaaatatccgtaagccggatgttttgcacgttcaataatggcctccggaatcgtcggcactgtcggaaagttcatatccgccacccacatcgggataaaatcaaaacctccctttggttttgacggtgacattcccggatacattccaagaccatctacagccatagcatcttgtccttgtctgtcaatgatcgatgtaaaatcatatttcatattattcctatcctcattttttccagcattgattgcagctgctgactgcctttcaccgctgattttatcttcttttctattttcctatatctgcaccgaaaaagcaattctttctctgtatttcgttgacttttttgttccatatcgttatactttatcacagaacttttgaaacatcatctattcgccaaaagttctgttttattaaaagattttgtaactgttcagagccaagcaagatttcaaaaacagttataaaatgcttacatttttaagactgtttttgaaattttattttgcggatacgccacaccgacgaaatgcgcagcattttgaaagttagctctgaacagttacaagatttttacgaaaggtgtctatttatgctaacctacattttattgatcctaggatttatcctgcttattaaaggagcggacctgtttgtagacggcagctcatccattgccagactgcttcgcattcccgctgctgtcatcggcctgaccattgttgccttcggtacaagtgccccggaattatccgtcagctgttcagctgccctggccggtcagaatgaaattgccatcagcaacgttcttggttccaacattttcaacctcatggttgttaccggtgcctgtgctgccatcagtgccattccggtcaatgaaggcattttgaaacgtgagtttccattttcaattgttgccgcagcactgcttctgatattcagcctgttcggattcggacggctcaatatcggccgacttgaggggctgacgcttcttgtgctttttgttctctttgttgccatccaggtcagggatgctttaaagtcccgcagtgaaaatgctgaagatccaatggaagaagttctttctccattgaaaagcattgtatttgtcgtcatcggatgtatcatgatcatttacggcggcaactttgtcgtggacagtgcctctgaaattgctgccaatttcggtctctcagaaaccctgatcggactgacagttgttgctttcggtacttccctgccggaactggtcacttccattgttgcctcaaggaaaggcgaaaacgatcttgccatcggtaatgtggtcggttccaatatcttcaatattctgatgattcttggtatttcaacaagtatccatcctgtcgcactgcagccttctgctgtttacgactgtattatcctgatgatcttcagcatccttgtccttttcttctgctggagcaagaaacgattggccagaggcgagggcatttttatgattattctctatgcgatctatacggtttacattatcatgcgctgataagataaaaatataagaaaaaactcttgccgaacggcaaaaaacatgctaacatgaatgcaatcagcaaagaggctgcagaatatccgcggcctctttttgtttttcacagatatcatgaccggactgcctctgcctgttcatgccgccttgtctgctgtctgtgaaaataataaagagagaggaagatgtaaatgagctacgaaaaaatttttgatcttgtaacgaaagtggatgacttcgtctggggtcccgctatgcttgtcctgcttgtaggcaccggtatttttctgaccatccgtgttggtttccttacatggaaaaatctcggatacgccatcaaaagtacactgagtaaggaggcccgcactcagaaaagaggcgatggcgacgtttctccgttctccgcattaacaaccgctcttgcagctaccatcggcaccggcaacatcgttggtgttgcaacagccatggtatccggcggtcccggcgcccttgtctggatgtggatttccgcctgtttcggtctgacatccaaattcagtgaatgtatgctggccatcaagtatcgtgaacgcaatgaaaaaggtgaaatgtccggcggccctatgtacacaatgaagaaagcactgcctaaaggattcggtgcagtccttggctggctgtttgctttatttgccgttctggcttcctttggcatcggcaatatgacccaggccaactccatttcttccgctttaaacgaaaccgtcggcttttccaaggtggctattggtgttgtcctgaccattctctcacttgctgttattgtcggcggtattaaatctatttcaaaagtttcttctgttgtcgtccctctgatggctgttttctatattattgccggtattattgttatcatcggcaatattcagaacatcccggccggtcttgtcatgatcttcaagtatgcctttacaccacaggctgtcacaggcggcgtccttggtaatgttgtcgcttcaatgatggcggccatgcagtatggtattgcccgcggatgtttttctaacgaagctggtatgggttctgccgccatcactgctgctgccgcaacaaccgatcatcctgtccgccaggcctatatcaatatgaccggtacattctgggatacaatcgttgtctgctctatcaccggtctttgcattgcaagctccggcatgctgggtcagatcgatcctgccacaggcagtctctatacaggttctgccttgaccatcgccgcattcaaaaccgttcttggccctctcggcggatggcttgtcaccatcggaattgcactttttgccttttccacgattctcggatgggaatatcatggtgaaaaggcttttgagtatctgttgaacacacacaaattgaatatcatttaccgtctggttttctcatgtgttgttttcttcggtgctaccatgcagctagaccttgtatggaaactttccgatatcgccaacgccctgatggccattccaaacctaatctgtatgcttctgctgagcggtgaaattgcccgggatatccgtgaattccagaaaattctggataaagaacgcggcagataagatttaaatctattgctataccaaaaacagcaggtcagctgatctttttcatccgctttcctgctgctttcattttaagaaattctgccgttcttcatttcatataccacatctgccacgttcattgtggatactctgtgggataccaagacaaccgttttcttcttggtcgattctttcaatgattttaagatgattccctcatttaaagagtcgaggttcgatgtaggctcatcgaggaggattagagggcattcatggagaaatgctcttgcaattccgattctctgtttctcaccgccggacagcgtgtcacccagttctccgacttctgtgtcatatccttttgaaagtgtcataataaaatcatggatagacgctttctttgcggcttccataatctcttctctggatgctcccggctttgcgatggcaatgttgtttgcaatggaatcatggaacaggtgcgtttcctgtgtgacataactttccatatctcttaaatgcttggttggaatcttgcggacatctgtaccgtctaccgatacgcttccatcctgtacatcccagaaccgcatcaacagttttaaaagtgtagattttccggaaccactcgcgccatgaatccctgtgattttacctggctgtaatttcagtgaatagttatctaaaataacttcttcaccataagcaaatgttacgttctctgcctctgctcctgtaaattcatattccatgctctctgcaccggaagtttccacatcccccggaatttcttccacaagcggcgtctcttccagaagggaaagaacacgttcaccacttgccaatgtctggttcaggttgttggaaaggcttgataatgctactaccggtccgaaagaacccatcattgcgatggtacaggttaagattccctcgaatccnnnnnnnnnntcgccttttgcatacaaccaaatcgtcagtgccagcattccaaaggatgcaagcaggataaccatgttcgtaaatgaacgctgtgagccttccattttgcttaatgactcctgcattcctgcaagatttttggaacgctcagacatctgctcttttctcttttcaccctgtccgtactggatggtctcgtccaatcctcgtaaagagtccagaacaaagctgttcagttctccgaagtttgtccgaaattccattcccttctggctgccacgttttccattccacatcgggatggctactccgacaatcagataagctgccagtgcaagcacgcctgctaaccagtgatatcttccgataaaaatcaccataataattgaggtcagtgttgcaatcgcaatcggggaaatggtatgtgcatagaatacttccagtaattcgatatcggttgtaataatcgaaatcagatttcccttgtcccgtccttccagttttgccgggcagagttttctcagtgctgcaaacactttatggcggatgattgccaacagcttaaatgcgataaaatgattacaatactgttccacataatgcaggattccacgaagcactgccatgacgatcatgactgtgataatcgtttttaccggagtcaataccagccacatattgtccaccggaacgatcattccggctactcctgtcagaagtccatgcacgatgacctgtcctgccaatatcgtcaggaagattgcacacaagtaacctaatgttccaaggatgattgctgccagcatgatatggagcaggggttttaccagaccaatcagacttcccatgatctggatggcacttctgcgttttgttgtattcgtattttcactcattatgccattcctccttttccatagttttccagtgccatctggctttcatacagatgtctgtacgcaccattctggctcatcagttcgtcatgctttccgctttctttgatttctccgtcttttaagaaataaatcttatcagacttcacgacatttgccagtctgtgggaaatcagaagcaccgtctttgtctttgccagttcgtgaatcacattcatgatcaattcttcactttccacatcaatattggatgcggcttcatcgaaaatataaactgcactgtctgtccgaagcaatgctctggcaatcaccagtctctggcactgaccaccggacaggttgcttgctttttccaacaactgtgtctgcaagccatcctgtgtttgtaagaaccctaagagattcactttctgaaggacagcttccatctcttctttcgttgcgtccggttttgccatcttcagattttcttctactgtacctttgaacaggtagctgttatggcgaaccagaacaaccctctgcatcagatttatttcatttacttcattaagcggtacgccaccgatgatgatttctccgttatatccccggttctttgctgtaaggattcctgcaatcgtactcttaccacatccggattcaccaaccagagatacaaaacttcctgccggaagattcagattgattccttttaaaatctctctgtcctcttcataagaaaaatgcacatcttttaatgtgacatctaacgcgacctccggcagtgttttttctccagcctgtggttccggtaaatctaaaatcttgaaaatcttatcactcgctgccataccattcattgcgatatgaaagaacgaaccaagcagtctgagcggcaggaaaaactcgctggcaagcagaacgatacataacgttcctgccacgctgatatttccttttaagaattcggacaccgcaactgccataccgatcgcagctccaccataggcaacaatatccatcacgcttgtggaattgagctgcatggtcagcaccttcatcgtgattctgcggaagttctgggattccacatccatctcgtctgctttctgctgatctgcctgataaatcttcagtgtggtaagtccctgtaaattttcaaggaacgaatctcccagtccagtatagatgctccaatacttattcagtaatttctttgcaatcttctgtaccaccacgatagaaatcgggatcagcggtacacagatcagcaggatcacactcgctttcaggctcactctgcaaagaatgataaataatgtcagtggtgcgatcaggctgtaaaataattgtggaaaatattttccaaagtatgtttccaactgctccacaccctcagttgacacctgtaccacctccgaagaggatacctgctcactgtaggaagctcccagctttaacattttctcataaatcttttcacgcagaattcgctttacatccacacacgccatataggaagaccttgctcccatccgttcacagataaatcggatcaccacaaccagaactaaaatcaatattgtccgctcaatgatcggtacggttactgcccggtatactacctgttccagtaaatctgcgatagaaaagactgccaatacctgcgacaggagggctgcccactgccacaaaatcgtatacacgatatacttttttgcgtgggacaacaatcccaccagtcttgttttaatcataagtaactccttactttttcttttctttgttgctacacaccagatgccagatagcaagcaccggatgatacaacagcattcttggtcctgaaaaccgcataacctgcctgatctgttctctcatctccggcttataacaatgtaccttacaattcgcacaaaacgtcttttcttccataaatggacacttttgacttctttgttttgcataatccgaaagtttttgacagtcaggacacatctgcccttcctgtcttttttctttcggatgtttttttcggcaatacagccggatcatctcttccacgacatactgttctttctgccgtttcttttctactttctccatcttactctacgctttctgccatttcagcttcaggcttttctgtcttaactcttaagaagaagtataacaggtggcatacccacacaactgcgatacagattcttccgattggtacattcttcatgcagataaagccgatggccataacgaccgttaccattccgataatcttgcattttgttcctattgtcatggctcttttctgaacaaaactgtccagatgcttcttatataaatttgttcctatgaaccaattatgtaacttttccgaacttttcgcaaagcagaaaagcgttgccatgtaaaacggtactgtaggcaaaatcggcaaaacaatgcctatcgtgccaagtccaagacaaagaaagcccaggactatccaaactaaccttaaaggatttctcatcttctttcctttccgacatctgaaccccaaattggtgtcagtcaccttaaaatttttctaaaacttcatttttacttctattacaccgccagtacgaacttccgtccatcaaccattgtcacaccaagttcaatgccatacagctcccggatgctttcttctgtaatcacgtcttccggctttccttccaccagtactttgccgtctttcataccgatgacattgtcggaataagcaatggcctgattgatatcgtgcagcaccatgattatggtaatgccgaattcccgattaagcttccttacaagctgcaagatttcaatctgataccggatatccaaatatgtcgtcggctcatcaagaaacaaggtctttgttccctgacaaagagccattgcaatccatacacgctgacgctgtccaccggaaagtcttgacacttccctgtcacgatattctgtcagattggttacttccaatgcccactggatcatacgctcatcttcgtcactgtctccctgcatcattttttatcataatttgccatccaatgtcaatacaatttccacataactttgttgcctgaattgcaacaaatacgccattatttccttttattttgttgttattcaggcaacaatagacgtaaaagtgccgttattgatagtattttatcagtaacggcactttattgaaattatttattattttgttacatgttatgtgcaaatgataatttttctcatttctcatttatacccagaaatataataatgcagtgctttccggcatgtgaaccggtcctgcactacaggttacggtaactggtacaattcccactgtgccgattcccgtccatcggtggattctgcacgcttccatcgggattttcacgatgttatcttctatatctgcttcttcaaggacttcattatgctcatacttcaatgttttcagttttccagccatcatttcaccactcactctggagtgtgcttccatctctttcagctttaattccagatagctttctccattctcctgaacgatttcggctatttcttcaaatcctctcatcgccatagagtctcttccctgcccctgctttttattcatccggtaaagccggaacactaccggatgcctttcacatttctgcagattgtgctgtatctcctgatccagttcattctcttttttcttgtatactgattttttttctgcataggcgttgatcatcagttccagcatgtggatgtcgatattctccaccataacatccagtgattcatcgatttcttccggctttgcaccgatttcttccagatatttttcaagattctcatacaacttggtatatctttccagccattcttctcccacaggagtaaattccagtgattctgtcagaattcctctttctatgcagttcttaaaataacggttcaccgttgatcggttcacgccataatattctgcgatacttccctgagctccacgtttcttttctacttttgacaggccttgtaaatattgtagttgcagcattgtaggtctgttctgtctctttagatgttcacctttttccattttctttgtcctctcttcgtcaccatacatgaatattcaattcccgataatcgattggcaatggcttctgttcaaaacgggtaatcgcaataattgccactgcttctgtgaccggaattcctgtattcgcagtataggtaaagatgtctgtcggtaactgataaacacctttttcttctttcgcctgtatccacccatcatctcttctgtaccatacatagccgatagattcatctttttttctcttgagcaggaagcagttctgagactttttcattctcaatatgaccgagtgttccagtttcccgtactctggtgcaaggaatcttggattgcgtcgttccggttcatacagcccaaatgccatcgggaaatcgccgtcctcataaaaggtatacaagtccatatcgtcataaaccctatcgtatacgtcaccgtactgcagaaagttttcaattccttttaatccttccggactgatataatgttccactctacaggcatcttcctgcgccctctgctgatccattccacttaccatctggaagaactgtgtcagtttctcatggcgtgcaaggcactccataccttccagttttcccttatcggtcagttcaagatgtccgttttccggctcacacaaaaatcctttttttaccagactccgcaccaaacctgccgcttcatatccggttatgttcacttctctggcatactctttcgatgtgatctgtctgccctgtctccatgtccggtagacatattccagaagatcttcttctaattcgcctctggcttttgtcacatcaatatttctgttttcaatcttctttaccattttatctttcccacctgtcttttgccactttctttgtttccattacttttttcctctgtttcttgtttcccgattacgctttggttagttggttcaaaccatgtattttaaattatattgtccttttttcagatttgtcaatgcattttcccctacaacattataattccatataaaaatatccaaaaatatgtttttatttctttttttcacatacttttggatattctcatcgtttaattccctgtttcctttaattttgactcatccgtagtctgtgcgtcaatgcagactgcatggatggcaagccgcttgctgtatccgttccctgtacatgtagaaagtgtcagtatcttattactggtctgcggctttactcctctatcaacatcggaatcttttatcatctggttcggactcatcatttacatacgcttcggcaagtttgtcataatctctggcggatttccatcggtcaatgtattgggcaggatattccaaagtgctaccccgattaaaaccactgacaacaacacctataacatcatcgcaataaaataaaggccccacaggcagaaatcgttttcttatcgttttttaacagattctgtctgcggagcctcgtaaaatgaaagcattttccaagtcttgaaatctctttgatattctattgattgtttatcagatattctattctgttttattaattacttttaatcgtctactgcctaacgactatccgaggctatgacagtcaggaaattgtcttactcttggctaaaaattcctcctgagtcatatccataagagttgccgcttctttaacagttacttttcctgactggataagcgttatcaaaagctgaagccttccttcggttaaaccagcaagtcgtccctcatctctactatcctgcatcatttcttgtattgctttgcacatatttacatttcccatgctgtccacctcctctttttcaattgttacacttgtaatagtctctatcactctggctgcttcaacctccatattcattcttggattatcataaataaactctgccagtttgtttttgtcatttgaatatttaatgcatcctatcacttctctcaggctggaaggaaacttctccaactcatcatcagcaatttgctgcggactgataatatgcagcttatagtcctgcgcatatttctcaaaaatcggatttgacatatccagcatatttctagccggcattgcgtaatgcacttccgtctgattctctatccccaaaagcacataggccgctttctaactttctgaaaacgttgggcgatgagcccatacacgtaaaaaattcccgagatcttaattcaacctggctgatgatatccttctggaaacagtgggcaatgagccccatacacgtaaaaaattcccgaggtcttaattcaacctgactgatgatatccttctggaaacagtgggcgatgagcccgtttccagaaagatatcatcagccaggtgattaaacctcgggaattaatctttattttacaagaccaatgagttcgttgatatcttccacaccatgtcttctcatgtacgcttcaataccatcaataacttctacggttgtatatggatttgcaaagttagccgtaccgattgaaacagctgttgcaccggccagaataaattccatggcatcttcagctgtacagataccgcccataccaatgattggaatcttgactgcattggctacctgatacaccatacggacggcaaccggcttaacagcaggaccggaaagaccgcctgtcttgttggcaatggcaaatgtctgtctttcgatgtcaatcttcataccggtcaatgtattaatcagagacaggcagtctgcaccgccggcctcagcagccttcgccatcactgtaatatctgtgacattcgggctcagtttcatgatgatcggctgtttggccttggccttgacagcctttgtaatggcttccactgcctttggatcctgcccaaaagcaataccgccttccttgacgttcggacaggaaatattaatctccagcatatccactctcggttcatctgcaaggcgctcaaccacatccagatattcttctgtcgaatggccgcacacattgacaatgacctttgtatcatatttctccaaaaacggcagatctctctttgaaaaaagatcaatgcccggattctgaagtccgatggcattgagcatgccgctggctgtctccgcaatacgtggtgccggattgcccggccatggtacactggctacaccttttgtcacaaccgctccaaggcgattcagatcaacaaactcactgtattctgcaccggaaccaaatgtacctgaagcaaccatcacaggattcttcagctcaactccggcaagattcacctttgtattcattacagttccacctcctgtgcattaaagaccggtccatccttacagatacgcttattgtgtacatttgtgtgatgatccacatcctttgacttacagacacatgcaaggcatgcaccgataccgcaggccatcttctcttcaagtgaaatccatgcctcaatacccttgtcagctgcatactgtttcagtgcacgtagcatcggtgtcggtccacagctgtaaatcacctgaccatcgacactttctgcacgaatagcatccagtacattgccctttgttccgcagctgccgtcctctgtggcaataaccactttgccgtattgctcaaattccttgttcaaaaacagttcatctctataaccaagaacgatggtcttctcacagtccagctctttggcaagctccagcatcggaggcacaccgataccgccggccacaagaattgccttatctttcttcaatgtataaccattgccaaggggccccataatctccaatgtatctcctgctttgcatcctgagaattcttttgtaccataaccaacaacacggtacacaattctcagtctgccgttttccctgtcgatttcacagatactgattggtcttggaagcagtttgctgtcgtcattcgaatagacagagataaactgtcccggctttgcttcagaggctatactgccgacttccagccacatactgaatacatcagatgcaagctgttcctgagaaaatacagttgctttgattttacttacactcatgcttttgtcctttatataatcactgttgaattgctttatctggtttcatcattctatatcatcagcagcaaaaatctgctcaaccagcttttacagtaccgatgcgatatctttctgcatatcaataactgctgctctggaagcatccgcaaaatgctctgcgccaaacttcgcatacttctcctgcttataggcagcgataatgcctcttgatgaattcacgatcgcaccaaggccattctcatcaaaattaggcagcagatccttcgctgtagcgccctgtgcaccataaccaggtacaagaatataagccttcggcatcagcttacgtgtaattcttgcctgttcagggtatgtggcaccaacaacggcacctacatagctgtatccacattcacctacatagtcactgccccattcattgaccttctcagcaacgtactcaaacaacggacggccatcgatcaatctatcctggaattcaccgcttgacggattcgatgtcttaacgaggataaaagcacctttcttctctttctttgctgtattgataaaaggattgatactgtctgagcccatgtaaggattcagggtaacaaaatcttcattaaaaccatataatgaacggcttcctacctttacagggcccagatggcctcttgcataggcttcagaagtagaaccgatatcgcctctcttaatatcaccaataataaccaaatccttctgacggcaatactctactgttctgtgaaatgcttccagtccaggcagaccaaactgttcatacatagcaatctgaggctttacagccggaatcagatcataaacagcatctacaatcgccttgttgaactgccagatggcttcagcagcaccttccaatgtctcaccatattcatcaaacgccttcttctgaatatgttccggtacaaatgccagattcggatccagtccgacaacgattggtgcattcagtttcttaatctttcccaccagtttatcaatcatgtacgctatatcctccttaaacacaattttccttaaacatccctttcattttagcatattcgccattttgccgcaagtctatcaccatgataaatccgaatcgccgcaataaactgctctgtgcctattgcatctttttccattttcttacattttcttgcattttgttgtcaaatcgcacgatacttcccaactttgtaaatttactgattatacgcctgttttttcaaaatttcacgtacttttttctaaaatcttcaattttgtaaaatttttattaaatctttgctctgtcatccctgttttttgtggattaattttccagatcatgggttgacatcttacatacacgtcagtataatgttagtcataaagtttcccacagcattgtggtgaatcaattcaataaagttctgttacagatgatatcgaaggagatatagatggaaagaccggttattccatctgtatctccttttttgtttcagaaacttgaacaggaggaatagttatggaatctaatgcaatcttagaaacagttaacagtattatttttggaagccatggcgtctggtttctgatcggcgcggctctggtttatttcatgcaggctggttttgcaatgtgtgaagctggttttacaagagccaaaaacgtcggcaatattattatgaagaacttaatggacttctgtcttggtacagttgctttcatctttgttggttacaatattctttgtggtgacgcttccaagttctggggcggttttacaatgaatccttttgatttcggcagcatggactgctatggattcgtatttaaccttgttttctgtgcaacttgtgcaacaatcgtttccggtgcaatggctgaacgtactaaattccttacttattgtatttacagttttgtcatcagtctgcttatctatccaatcgaagcacactgggtatggggcggcacagcatggttaaccgatcttggctttactgattttgccggatccgctgttattcatatggttggtggtgtcaccggtttcatcggcgcctgcttccttggacctcgtatcggtaaatatgacaaaaacggtcatgcaagaccaatcctcggccataatatcagtattgcagcacttggtgttttcattctctggtttggctggtacggtttcaacggtgccgcagctgcagacggacagcatcttggacaaattttctccacaacaacacttgctcctgcatgtgcaaccgttgtcgctatgatttatacatgggtacgttttggtaaacctgatgtttcactttccctgaatggttctcttgccggtcttgtagccattacagcaggctgtgataatgttgataacgttggtgctatgatcattggtgctgtagccggtctcctcctttgcatcttcgttccgtttattgataatgttctgaaggttgatgacccggttggtgcctgctcagtgcatggtgtgtgtggctgcttcggtacactggccgttggtctcttcgactacacagacggcctcttctatggcggcggtgttcatcatctgctgatccagttactgggtgttgtctgcatcgcaggatgggccattgtatgtgacctgattctcttcacaatcctgaagaaaactgttggtgtccgtgtatctgaaagagaagaacttgaaggtctggatgcaacagaacatggtcttgaaactggttatgccggattcttaatggacaaagataactaaaactaaattcgctcactcgttattttaatagaattccttccatataaaatagagtcgatatcgtaagatgaaaatctgatatcggctctattttttacattttccatatcccatcgacatcctgcccattctatcgacacaatgtgaaaatttattcttgtatcctgcagatttgcatggtatgataaagctaaagtaagcaatattctttataactccttgtttacatgaaagaggtgaaatctaataggagcaatagatacgattacaaaagcttacgtaagagaaaataaaatatttgcagatgcgtttaattatctcatttatgacgggcatccagtcataaatgctgagaatttacacgaattggatatcaccgaaattgcattacccacaagcattgaaaatactcaagatattaaatctcatgcatccgttcaacaataccgagatattcttaaatctgcatcaatcaagacacatcaatccgtcgtttacatattattaggaattgaaaatcagacaaatgttcattatgccatgcctgtaagaaatatgatctatgacgcactccaatatggacgtcaagttacagaaattgcatccgcacacaaacacgctcatacagacaaaataagtcgcgctgaatacttatctggtttttataaaaccgacaagctcatccccgtcatcacacttgtgctttatttcaatacaaatgcatgggacgggccattgtctttattcgatatgatggattctgatattcaaaagcacgactatgcaaaatatatacaaaactaccacctacatctcattgaaccatcaaaaatttcagatgaagatttgaacaaatttgactccagcttaagagaagtactcggatgtatcaaatacgcaaaagacaaaaataaattagctgattttattcataataatcccagaatgaatatagatatatcagccgcacgtgttattggcgcaataaccaatacccctattcactttcagaaaggagatgaacaaatcgatatgtgccaagcaattgaagagatgatacaggatggcaaaaccgctggaaaaatcgagggcaaaattgaaggtaaaattgaactgatatctcaattattacgattaaagaaaattacaatgaatgaagcaagtgttctgatgcatatgagtaaagaagaattagaaaataaaatccagtttttctcttaaccaaaatgaatgagatgaaatattccctctatatttcatctcattcgttgcttctatattgtttcaatagcatatacaatttgaattttttttaactttttgccttttttctgttgacaaatcctctttcatatagtatagtatccatgtgcttgtgaatagcactttttatgcgcgagtggctcagttggtggagcacgaccttgccaaggtcggggtcgcgggttcgagtcccgtctcgcgctcttcataattcaaaaaacacatctgcatcagatgtgtttttttctttactgagactcgaccccgctcgcgggttcgtatctccgttccactccggtcggtgctaacaaaggtccactggacctttagcaccccgtctcgcttctactctactccattgccggactcgaacgggttcgtatctccatttcactccggtcggcgctagcaaaggtcctctggacctttagcgccccgtctcacgctcttctttttaaaaagcacatctatgatgtgctttttctgttttctgactcgaacccgctcgcggcttcgtatcttcgctccgcttcggtcggtgcaataccaacgtccaccggacgttgtgcttcttcgctccgcttcggtcggtgcaataccaacgtccaccggacgttgtgcaccccgtctcgcttcttcttaattgccggactcggacggtcattcagttgtcaggtcggctctttgccctcacgctaatcaattggaaatttattttcgatttgaacgaagtaaattttgtaaactttccgcaaacgaccaaaagagccggtacacagcacatcaaatcagcgagagataatctctcgctatatctttgatgaaactatgtaccggcgctgaaattcagaaaccttcaatgtctgctttcttccgttccgcaggcagacactgcactggaacggcgcagccgcaatctttttcggtagattgtgacaggaaagacggctgccgtttccgacagccgcccttgggttaaacatttgattttactttacgctgcgctttttctttctgccgtaaacggttgttgccgttaccgcaccgccgctgataaacagcagagcaatccacaacaaaagcttggagttatctcccgtctgcggagacttgtcggcaccgggtgtgatggtgccgctgggccgcttcgccgttacggtatcggcctgcttgatttcctgtgttgccgcagcgtccttgtaatacttcttgcaaccggagcagtaccaatactcgatattgccctcggcagtcttggtcgccgccactgccgagaagtgtttcaaatcagagtggttgtttacattcagctctccatagctttcgccgcagaactcacactttgccttgtccttgcaggtggccttaccgccggagtgctcactgagtgtcttgccgcagaggtcgcacttatgatccttattggtatcggtgcactcactcaaaatcttttcgcaaacatcgcacttgtgatctttgttaccatccgtgtgctcgacttcatccgtttttgctctgcactcggtacactcgtgccaatggttggtttcatccgttgaccaatcgggtgagtagctgtgcggtttcagatcgccgtatttctcaccacaaatctcacaggttgcctgctcgatgcaggttgctgttccgccggtgtgctcgttttgaatggtaaccgtcttttcggcagagaagtcaaagccgtcagcggtctttgcacttacgatcagcttaaagctgttttcttccgccggatatgtggatgcttttatgataccgctgtacaaaccattctcaacggtcggcgtaagagggccatcaccaagtccgataaactcatacccataggctgcatccgtcgcgccttccggcagagtaaagctgaatttgtaatcctgcgtccggcaaactttgtcggagccactgatgttaatggtcggaatatccttttttgtagtttcgtgattgcagaatttacacttctgccaatactgcccgttttcactctgccactcgtaggtgtgtccgtcgttcacggttacgataacccttgtttcattgcctgccttgtcggtcacaacaatcgtctgctcaccgcttgcgggagagagaataaattgaccgttttcatcaaggatgacttccgtaccgttcaccttcactgtgccgatatatttttcgtcaacggtaatagtctgtgccgcgcaataggttttgccggcttcaatgccggtgataacggggcttgttccgtcaagcacaataccgtttgtgttaatgtaggcaacgtttccgctggtatcggtcagttttgcataaataacatactcgttatcgggattgatactgaacggtgcggaatatgccgtaaaggtcattcccgcaagttccgattcggcaagcgccttttcgctcagcaagtattcaattgtcaccgtctcgccgctgttgtcagtggccgtaacagttaccgtctgcgtatccttaaagaacaaaccgaaggtgatggtgttgaggaaagacttccagtcgttttcggcaatcttgatttcgcctgtaggtgctgcaatatcacgccactgagccgtgatcgtcagattctccgcaggcatggttgtcgggaatgctttatcccagccgttgaactgatagccctctcttgtcagggtcggagcggtaatcggtgtgccgtaatcctgcgttatggtaatatccgcttcgccgttttcgggcttgactgtgacggtatattgattgatttcccaattcgcccaatattccttgttgcccgtttcggtgtcgccgattgccgtaacaggagagccggtcagattttcgttgtaataccagcccttgaaggtgtacccggtgcgcgtcacatctgtcgggagtgttgcacccacgccgtaggtgtattcgatgacattgccgttgttgatcgtgccgccgtttgcgtgcagggttacggtataggtcggggctgtccactgcaccgtcagttccgtcacatcagcaggaacgctgtcgccgggttcgtaggatttgccattgccgtcaagccacatgaagtagctgcctgtatttccggccgggcgggtcatgccgtcggacgcaggcgcggtaaactcgctgccggttttcacgatgatgtgaatagcatcggagctgccgcccagcgtgccgccgttcaggtcaagggtaacggccttcagtccgtcagagcccagtgtgtcagggttcaggacttcaaggacggggcggaaaccgacgtacggggcggagtacgtagcagagttgctgctccagcagcgggccgaaccgagcccgcgaaccgcacggagcaacgcgccgccaaaataagtatcctgcccccacgaatacagtatattccagttttggatatatccgctgttcttgttcagcatcgtgtcccattcgttgctttggggcacgccgcgttcggaattgcccgaacctgtaaagttacttcccacagacggcgcgcgcagggtatagcccacgccgccgctggcataatctttgccgaaaatcagacttttcgtatttaagtcatcccagcttaccgtatgcgttacattgtagtccgcaataaacaggctgtgggcgtatttgttctgctgtgcatattcctcggtggtcgccatcgcagacgtgagcttgtaggcttctatcgttccggcataagtaaagggaacatagtggagcgtcgtgtccggcagactgccgtttgccgttccgggtacgttctcgccggagaggtcaaaataatatctgccgccgggggtgagggaaaactgttctgataaagcaaactgcgccgtgagcttggtaacgtccgccggaacaatggcaccgggcgcgtagagcttgccgtcgctgccaagccacataaagtaactgcccgtatctccggccgggcgggtcaggccgttggatgcaggcgcggtaaacttgctgccgtttttcacgatgatgtgaatagcatcggagctgccgcccagcgtgccgccgccaaggtcaagggtaacgaccttcagtccgtcagagcccagtgtgtcaggtttcgggacttcaaggacggggcggaaaccgagggagacgttccgacccgaggacgagaagtaaccccagaagcgggccgaatagttcccacggaccgcacggagcaacgcgccgtcagaagaaacatcctgtccccacgaaaacattccattccagttttggatatatccgctgtccttattcagcatcgtgtcccattcgttgcttttgggcatgccgcgttgggaatcgtcccaacctgtagagtcacttcccacagacggtgcgcgcagggtatagtccacgccgccgctggcataatctttgccgaaaatcagatttgcggtattcagggtatcccagcttacatcattcgttacgacatagtccgccacaaacaggctgtgggcgtatttatactgctgtgcatatgcctcagtcgttgccatctccgacatgagcttgtaggcgttcaccgtacccacataggtgaaaggcacataatgcagcgtgctgtccggcagattgccgtttgccgttccgggaatattcatcgctgataggtcaaagtaatatctgccgccgggagcgagggaaaactgctcgtcaggcgaatcattagccaatagcattggcgcagccagcgcccccaatgcagcggcagcttccgcataccgggtcatatccagctcatcgatttcctcgtcggagagcttctccttcgcctcgtcgatggcctcaagctgcgccttgacttcttcggcgttatcttcaatgatttcttctgcgttcggtaaaccgtcgatcatggcctgtacctgatctgcggcactcagctctgtgggaccattcggatcatcggctctctcggtgctgccgttttcgccggttctgtcctcaacagggatgtattgaccgcagttctgcggtatagcattctccgctccacagacagggcattccttgttcatgctctccgccgtgcaggccgtttcacagctgcaaacaggcggtccttccgcactgtcctccgcaaatgccgccgtgggcagcaaccctatcaacatcacacagcagagcagaagacttaaaattcgttttctcatttcgtttcctccgtttcgctgccgctcgacagcttaaaatcgtatttcatttccagcatggcaaacagcttatacataacctctgtggcgattgccttaatatctaatgactgaataaaggcaagcacattttcctgttccgcctccggtatccgatacacccgcattgccgccgtcaaaaagcggctgagcttgcgttccaacggaaaatgaatatcacattttctcgccatatagctgcgcatcaatcccgccgtgccaatttccatctcataaaagtcgctctcggtatcatcagggaaatgttcaccaaaaatctgcttcagctctgctgtggtatgcaggtaaatatattccgacgtgtcgggcagggaataggcttcaacgtaacaaggtagccgtatcggaaggtgcggctggatcacctcctttctaaggaaaaagaagtagggattgttttattgtctagttatcaatgatataatttcatattctcgcacttttgtggtggcgatgcgcttaggggacacacccgttcccatcccgaacacgacggttaagacctaagcggccgatggtactttgctggagacggcacgggagagtaggtggctgccacattattttgggggtgtagctcagttgggagagcacctgccttgcaagcagggggtcaagagttcgaatctctccatctccactgtcattatttattaatgacatatcaatgcaatgtaccttgaaaactgcatatcagaaacacatcaagccgtaaatcatcgaaaagaaaagatttacagatttcaaaagaatcttttgaaatctgtaaatcttttcttttcgatgatttacggcttgatgtgtttctgatatgcagttttcaaggtacatactcattaatataccaccatgagcaattgtccatgatggtaaatggagatggagagattcgaactcttgaccccctgcttgcaaggcaggtgctctcccaactgagctacacccccatatgggcttaagtggactcgaaccaccgacctcacgcttatcaggcgtgcgctctaaccggctgagctataagcccgtaatttggcaaccacctactctcccgtgccgtctccagcaaagtaccatcggccgcttaagtcttaaccgtcgtgttcgggatgggaacgggtgtctcccttaagcgcatcgtcaccaaaagtgcttttgtattatatcttatattcattcgcttgtcaagaacttttttgaaatattttatttcttttcgacagcttaacaataaaacaatccctacttctttttccttagaaaggaggtgatccagccgcaccttccgatacggctaccttgttacgtgttttttgtcaagcacttttccctaaaaaaagcgtcagaattccctgtttttagcgagggattttccctactttaggcaggacgttttatgcatcctgacgcatgagggcatgctccatccggtagctttttccctcaaagattagtaaatggccatgatgaacaagtctatcgatcatagcagcagccatctgatcgtctgtaaatatccctccccatttggaaaattccagattggttgtcagtatcaggcttttactctcataactgtcggatatcactcgaaatagtaactgggagccatccttgtctactggtacatatccccactcatctagaatcagcagatccaagctgcgtaaatcccggagcagcttttccagagtcccgtttttacgggattccgccagtttcagaaccagttctgttactgtataaaactttgttttatatccaagattacaggctttcacaccagcagcgattgccatatgtgttttccctactccaacaggaccgtatagtacaagattcttctgcccgggcacaaattccagtgattcaagctcctccctgctaaaagcaggaggaagcttgacatgctggtaactgtatccttcaaatgcctgaggatcatgaacgaacttacaaatcagtatggctttcaggctgctgcttctgcaatggaaatggcatgtgccagagggaatattaatatttgtgatgcatcagtactggctgcccggatcaccggatatgggatcagtactccgccagagaccggtccctcattggagatctatgacgaagcattcctgaaaggaggcaacaaagcattatgatgacaccaaaaatgaaagaagacctctgtacacagatcctgaatgccagcagacagctgtttttatcctcaaagatctccgaggtctgtcaggagaagggaacccagaaacaactggagtttatcctggaactcatgaatgaagagcttaccctgcgtgataaaaaccgccggaaacgtctgatcaaacgggcagggtttccaacatacaaaacatttgaaggatacagttaccagcatgtcaagcttcctcctgcttttagcagggaggagcttgaatcactggaatttgtgcctatttctctaatagttcatcgtttcccataattaccgcatcccactgttccatatcgtcattgtccgttacatttatatggggatgctgcccaaccttttgcttcactataatttccgaagaaagctttgctttcatttcccgatataccattggcaaatcaatcccctcttggtcaattttattgatgaaaaaaattgtcggaatcttcattatctgtagtgcatgaaacagtatacgggtctgtgcctgtatgccatcctttgcagaaactaataatactgctccgtctaatacggataaagaacggtatacttccgccaaaaaatccatatggcctggcgtatctataatgttgacttttacatcctcccactgaaaagatgtcactgctgtctggatagtgattcccctttgacgctccaaattcattgtatctgtccttgttgtgccttcatctacgctccctagttctgcaattgcaccactggtatacaataaactttccgttaatgttgtctttcctgcgtcaacgtgagccagaatgcctaagttaattattttcatgtgattttcctcctatcatccgttaatgttgtctttcctgcgtcaacgtgagccagaatgcctaagttaattattttcatgtgattttcctcctatcaacacccaaaaaagggcataaaaatacccagtgataaatactcctatcactgggtaaataactccaatagccccaaaacacttatatgttttcgggcatataaaattacatgataaaagtattcttaaactgggtacaaaaaactaagccccatattaaaagtgaaacgggactgctactttttgttcccactatcaaattgacagtttatttaagaataccttgccgcatatttattaactccttgtataatactgaatctaattatattccttaaccctttatttgtcaagctgacaaactaaagcagaaaaagcggcaggatttccccctgccactaatcatctgtttatgcaaaaataatttccttttccacaatctccctcgcacaagcccttatgttattaatacctgactgtatccatcgttgctgtaagggaatgataaggtaagatatttcttcctgatcagctttccactttcatagaaatcagcttctccaaaatcaacctgggcggggccgggatcccataccagttcaaggtttgctttttctgtctgaacggagcggcactttttcagatagcgctggacaacactgtagctgcctgtatatccctgttcttcaaccaggcgttcatatatccgctgtgcagtgtgatgctgtttgcgccagtgttttttatcctcatcaagccactcctggataacaggcttaaaaggatccagcttggatggttgcgtctggacaaccggcggtaccggagatatctatttatggtcatcggggtgacaggattcgaacctgcgacctcttgatcccaaatcaagcgctctagccaagctgagccacaccccgatataaagcattataaaataaaaaccatgcaccttcaaaactgcatatcataaaacactctgccttttagaaccgctctcttaactctggctcttttcgggtatgttctcttcgctccgctctgagaacgaccttcgaactaaacttccccctgccactaatcatctgtttatgcaaaaataatttccttttccacaatctccctcgcacaagcccttatgttattcgttcttccagtccattctaaggcgttttcttcctttaggcattccgttatgccctgtgcttgcttcatgccctctatgagccgttcaaagtgttcctgtgcctgtctgtcaatgtcggcaaggtaagcattgagcctgccgcttgtgagaagattggtgtatgtaattttgcggtactcccgcagatagtccaagtgccgccgtccgaataagtctatcgactgttccttttcgggtggtatggtaaggcagggtaaaatgtattcgccttgccgttcgtatctgccgcccatttcctcaaagattgattgtaccatttgtttttcctccaaataagatattcactccatactcatgtctgctatcattaacacaatttacgttttctccttatctggtttcatacatctgtgaaaaataaagaaatttctgtgcagataaaagcaacagtggaaaatgacagtcagatgtacaaactgaaattacatacgctgtggtcgcctatgaagaaagatgtatgaataggaattatcggtttttttgaaatggcaaaataagtatgaagattataaatatagagtgtatggaatcaatcaaattcatatgctctttttcttttttgattgaaataagtatgcgtggactacttttgggtgcgagtgtgatagggtagcgcaagaatagattagatggaaaggaagaggcaccgttaagtaggtacctcttctttttaaagagctagctcttttcctgatacgggaacttgcatctctggagcattaagcagtgatgtgaaattctgccgaatgatatcaagtgtcttttgctttttctgcagctcctgtttttctcggacggtagcagcctgttcagattcaagattttcaatctgcttctggattttattagagcttgggattttggtaacgccgagatcctgaagctctttttttagtgaatcgtgtagctggtattctgcctgatgcttggtacggtaagcttttggatttttagcagatttgcaatcttcaatcacttttcggcagagccgataagaatcacagtgcttttgaatgactttctgtgtgctcagctcactgttgatttgtgctattttttggtcggcaactttcacagaaacttcaatgtcagatacatgctgcttgaaatcctcataattcaacaggttattttcggaaagatagttaaaggtgcgggctgcctctttcagattattgagctttgcccatcgttcaaatccttctcgattgccggtcgtaacataagtggaaatattgatatacaggcgagcttctctggacagatgcttcggagttttcactttgttacgatttttagccaggcgaatgcgaacattttcttctgaataatagcttccgagagatttcatataagtgaagtttttctgttcaggcgcacggaaggataggtgctttccttggcggatttcgtatccggctaactgcattttttgtagaaattcctcatagttgatggaagtccagattgctttatcaactgcaacacgtagcttggctttccaactggtgccacgatggtattccatgttctctttatagcttttacctttttctccggttggcatactggtggcaagtccattttcatggcagatacgattactgatccggcagattttatggtagctccgcttattggaaatatatttgtgatgatcaacaaaacttgctgcattaaagatgatgtggttatgaatgtggtttttgtcaacatgggtactaatcacgtattcatattttcctttcagtacttcgtctgcaaattgttgccctaagcgatgggcagtttcggcatcaacttctccaggtttaaatgactggatcagatgaaatgccannnnnnnnnnnnnnnnnnnnnnnnnnnnnnnnnnnnnnnnnnnnnnnnnnnnnnnnnnnnnnnnnnnnnnnnnnnnnnnnnnnnnnnnnnnnnnnnnnnnnnnnnnnnnnnnnnnnnnnnnnnnnnnnnnnnnnnnnnnnnnnnnnnnnnnatcagtcttatcaggattcgtaatatagtccagagctttcttgtctgttactttaatggggaagatcttaagatacgccataattctttcaccatctctttcaattcttgcatttcttccggatatagatctccggtgctgtttacttttttcgcaatctgattaatattcacaccaatcttatgcatttcctcatactgtttcttcagtggagtagtatcggtgttgacgatgtaaccgtcgattgccattttacgaagataagctcccatgtttttggtctttgattcaatcatctttctgcggataagcttccgttcttcttctgtgacatagaaatggatttctttgcttctctttctttcagccattggcgtgttctcctttctgagaaggtagtagtatcgttgctttcagcttttttcaatttagggcagggttccctaaattgggatttcccggaagtgtatcctcacttcctgtccttgctgttttacccctctattagctaaagtcagaagaataagagaaatgcaaaagaatttggcaggtagtatggcatacaaaaatgtggtatgattaggggcaggatatcagaagaatcaggagttgaatagattgtgaagaaagaagaaatttttgaatatgtgcagaaacagtatggcacgattccggaatatttatggagtaaactaccggacagtgcagtacttcgacataagaatgggaaatggtatgcagtgatcatgacggttgaaaaatcgaaactgggattagagggaaatgatctggttgacatcatggatgtaaagtgcgatccagaaatgaccagcatgattattcagacttatggatttttacctggataccatatgaacaagcggcactggattacgattttactggatggttcgttcagtgaagcaaagatactggactttttggatatgagttatgacctgattgatggagcaggcagaaaagaagaaaatgtaagtggtttacagtgatttttgagcaaaagggaaaccggggattttactcctcggtttttcggctgttatgcttcagtcttcaacttgaaaaatatcttctacaggcactttcaggtaatgggccagccggattgcaatctcaagagagggattacgttctccacgttcgatgcggcctatagtctggctgcaggaacctatggcttcagccaaatctgcttgaatgagattccgttcttcacgaatatcttttaatgtattattgattgccattcaatcacttcctttgcttattgttatcagcaggatcatgaacctgctgttgaaatctaatgaaatcccggaatttctgcacctttgcatttcccgattacttttccaaaaattttaaaagagtcagattccaaaacctggataggacgatatttttgatttaaagagatcagataaacaccatctggctcatcgtgtaattccttgatgtaagtattgccgttgagatagaagattccaatttcaccattagcaagagaatcttttttctgaatccatgcaacatcatctgtatgataaagtggctccatactatcaccggagatccgtacaccaaagtcagtctgctcaggagcaagatgtcctacgtcataggtttcttttacagaatcttccaggtaatttccagtaccagcagaaactggttcccaggtaatttctacaggatgatggaatgggataatctttgcagatagtggagaaaactttttagaagcttttaaaatatcagcaaattcaatcaatttatttctgccttcttcattcaatccactcataatgttataggggttttctccaaagaaggattcatatatatcttcgatatcaagtaactggcaaagtgtcaggaaaacatgtaaagctggttctcgtgcattggtctcccatttggagattgcttttgtagtgacctgaataccttcctgagaaagcaggtctaccagatctgattgagagtatcctttcttttttctattttctgctaatatttccccgaaatcgtgcatttgttcgcctcatttctatttgaattttctatatgcattataccgtatgttagaaataaaatcaacaataatctccgaaatggagaaaatacaaccaagatgttacttgactatctccaaaatgtcgatatatactaaacatacagaaattgataaaacatcatgttgaaagaagcagctgggaggtgaaaagtttgagtgagcgtgtgatcctgcatagtgatatgaactgtttttatgccagtgtagaaatgctgcatcatccggaatttgccggaatgcctcttgcagttggcggtgatccggaagctcggcatggaatagtgctaacagcaaattatattgcaaagcgaaaaggtgtaaagaccggaatggcattatggcaggcaaaacagatttgtccggaaatcatttttgtgccaccacgaatggacttgtatttgagattttcacagatggcaagagaaatctattcggagtatacggacaagatcgagccatatgggattgatgaagcctggctggatgtatcggacagcagaaatctgaaaggaagcggaatgacgattgcaagagaaatcagccatcggattaaatacgaactgggtgtaacggtaagtatcggaatttcctggaataagatttatgcgaaacttggttcagattacaaaaagccggatgcaatcacagagtttaatcgagaaaattataaagacaggatatggcagcttccagcatcagatttgctttatgtcggaaggcagacaaataagaaattgcaaaaacttggaatccggacaatcgggcaacttgcggaatcagacgaaaagttgttagagagccattttggaaaaataggaaatgtattatggactttcgcaaatggctgggatgaagatccggtttgcaaggaagggtatgaagcaccagtaaagtcgataggtaatggcaccacaacaccgagagatctggaaaatgatctggatgtctggatcattcaaatagcattggcagaaagtgtagctgcacgattgcggaaacatggatttaaatgcaaaacagtagaaattacagttcgagataatggattgtatagtttttccagacagatacatttacgacagccaacgaatattacaaacgagattgtaactgcagcatttcagctatttaaagataattataaatgggaacatcccattagaagcctgggaatccgagctgcggatcttgtgttagatgatattcccgtgcagttggatttatttggaaatcaggagaaaaaggaaaagttagagaagctggatcgtactgtagatgagatcagacgacggtttggttatttcagtatacagcgagcggcaatgtatcaagataaagtcttatcccacttagacgctggtacgcacacgatccatccacacagttattttcatgggtaattggagggatagatttgaaaaaagcattaaccagaaaacagaaagaaagttatcaatgtattttgaattatatgaaggagcatggatacccgccgacagtccgggaatttggagagttgatcggggtgaaatcaacatcatctgctttttccagaatcaagcagttggagcaaaatggatatatccgcagaatcccggcatcgccaagagcaatcgagattttatagtgaggtgtcggtatgaacaaagtatatgtagatgtagtggcagagtttcggaaagacgggcagctggttcccatattttttacatgggaggatggaagaaaatatagtattgacagaattttgaaaatcgagcgatgcgccagcagaaaggcaggcggtgtaggaatgatgtacacctgtatgatacaggggcaggaaagccacttgttttacgaagtggataaatggtttatggagagaaaaacagcataaggagagattggtatagacgatattatttggattattaaccggcagggatagtcactttccctttatattcctgtaggttttacataagaagatggattccggtcagcaaagacagctcccacaatgccttttggatatccgcttctgcaagttgtagtaagtaattgcttcccatcaaaatcatggggaaagcgaactggtctgaaagaccgccagttagtgtgatgatgataaggagattttgaaactgatgacagacagagattatgcaattaaatcaatgaaagaaattaccttccagatggcaagtcatgcacaggattatctggaagttacaatcgaaagacattatactgatattaaagaattgatgacaagctatcagaaattgattttggaaaatcagattgtgttagaagaactggatatggaatgccaggagaaaatcaatgaagatatggcatatgtattgagttatctgagcatttataacaaccagctgaatgtgccaaagatgcaccgggagatgaataatctgatgattatttatggattgtcggacatgatctatcggggaatgactttggtgaagttctatgcaccgaatggtgtgatgctcagtgaaatccttcattcctgtttttgcagtcattataataagacagatgtggaagtacaacaggagttgggaataggcaggacttctttttataaaatgaagaagcaggcacttgggtatttaggattttatttttatgagatcgtggtaccgcaggcaaaggataaaagatttaaaccgtcactgggcgttgaggaagagtaggtgaataatatgagatacgaagattcgatgaaaggtgtagctgctcagataatcaaagaacagcagcgagtcagtaaaattaaaaacaatccagaagagttccattggcatgacgaatatgcaacgttgaatttctttcggtttatctgtaaaaatatcggtaacttgggaaatggagaaattgaaaaaatggtcacacgcttaaagagcatagatcagaaagcagtggaaaaccatgtgaatggtgctgtttgggcatttgattatgataagatgttctgtgtattgatggaaaatgaaatatgccaaaaggtgtgtgaaaagaataaatataatagttggacgaagctgattggaaattattgttttcaagtggtgtaggataaaatagtggcttgtgaaaagctggttttgatgttaagatgaaattgggataggagacatttaggaacctgttctgacacagcaaagaatggaggcgagaatggacgtgacgaaagcagaaaccgtgaaaacagaagaattggaaacacgttacgaaagatacaagggtatcttaaaagaccttaccatcatgagcgatgtgtttatgcggaatgtatttaagaaacgtgaatgcacagaatatgttctgcaggtaattatggataaaaaggatctgaaagtgattgatcaggttcttcaaaaggactataagaatttacagggacgttcagctattctggactgtgttgccagagactctgaaggcaagcagatggatgtagaaatccaacaggataatgaaggggcatctccaaaacgagcaagatatcatagtggtttaatggatatgaacacattaaatccgggacaggattttgatgaccttccggaaagctacgtgatttttattaccagagatgatgcacttggctatggacttccgatttatcatgtagacagaaaaatcgaagaagtcagtgagaattttaaagatgaagctcatattatttatgtaaattctaagaaacaagaggatacagaattaggcagactgatgcatgatcttcactgtaagaatgcagaagatatgcacagtaagatacttgctgacagagtatacgaattgaaggaaacacagaaaggggtggaattcatgtgccgtgagatggaacagatttatagtgaaggtattgaaagtggtgagctgaaaaaagcaaaagcctcagcattatccatggctgcggatggaatgaaagttgataaaatagcccactatcttaatgtaagtgctcaaatggtacagaaatggattgacgagagcatgagtgttgcacattaacaaatgataaattttaatggagctaccaggggatactaattcttctggtggcttttttgtgtgttgcatgtataaaaaagtgaaatctagttctatagaactataacttgatttgcggattctgtatctttcaattatccatcagtatactaattttagaccgaattatcgttctgaaggaggtgctatgatggatttaaaagcggttggtcagcgaatcaaagcagcaagagaagcaaaaaatcttacacaggaagaactggcggcgctggtaaatttaagtacaacacatgtcagtgtgatagaaagaggactgaaagtaacaaagttggatacctttgtagcaattgccaatgcacttgatgtatcggctgatgcgctactgatagatgttgtgacacattctgtcacaggtgttactaatgaattatctgatatgatagggaaattgccaaaggacgagcagaaaagaattttaaatgctgtcagagctttggtagactaatgaaataggcattgaaatcgaagggcattaagctcttctttttttgttcttttttatggcttcatttgcgaaagtatcttttttcatagtgagaatcatgatatagtagttctaaagaactataaataattctttgaaaccggagggcgggtaaatgagagaaaaaactatttatgagaaaattgcagaaaagtacaacacaacaccagaagaagtacgcagagaaatgcagatagccatagatgcaggatttgataatcctaatccggctgtgcaggaagaatggaagaaaatgacacttaaaggagaaagacctacaccggaagaagtaatcaattacgcagtaaaaaaactaaaaggaaaataaaaatatgaagaaaaagataattgcattgatttcaggagcagtgatcttgataattgctgcaggaagtatttatgggaaatctgaatctggtcataaggaaggcgaaccggatgtagttggaacattttccgtaaatcgagatgaaaatattacagtggttgctaaccggggacatatcggggataaagaagcttttgcaagagaacttttgcagatgtacaaggatgattcattttattcgacaaaattctccacagacaggggatatgcgacgagccttgatatgaacatctatttatggaaagaggatattgaagatggggaatcggtaatgacagccgaatatagacctgtagaatacggaaaggactatgatgtagtcaatcatcctgataaatttcaactatatatagatggaaaagaagtagaagaataacacgatgaactttttatactgaaatatgtacgattccaataatgatatgaacttatgggaatatattgcggatactttgtgaactttatcctgatacaatgattatgctgatgaaagaaggcatagataactgaatacaagaaagagacgaaagcctcagtagttaagaaaaaactactggggctttttttcgtgcctgaatttctcagccaataactgcgggcgtatcccggcaggataaaggcggagcaggcatgatcctaaacagaggtccgccttctggatttgaaacgagcaacaagatttcaaattcaggaggaacggatatgtatattgaacacccatatttttacgaaggaaagtattacgcaaatattgatggagaaatgatcgagattacaaaagaagttgcgtatgcgatgaataatttttacagaagcagcaaggcaaaaaaagttgagattaagaatgaactgggtgaggttgtggataagatgctgagagaagtaccttacagcggtcagtccattgatggagaaggcttcatgattgaggattttccagatctgaactgtgatgtggagcactgtgtactgacaaaaatggaacagcaggatattcacacagtgatcaatcaactgaactcagaggaacgcatgattatttatggcattttctttgaaaacaagacacagacacagatggcggagattatggggatttccagacagatgctgtcatacaagctgaaatccactcttaataagatgcgtgaaatgtatatgaataaatttttttaaaaaatttttcaaaatcttttgcatttgccaaagtcatttgactttagtaattagaggaagttaaaggacttcctaaaatgaaccatgataactgaatatccaataataactgacgtgacatttcatgcaaagagcacgaggaagatgccgctataggattataagacaaaacaaagatttttagttcagtctgtaatgctgcgaaaaagcactgaccgaagccagctggcaggctggtgatgcgatgatatgtatgagatgcgatacacttgcagatcctgagaagtctgtaactggtaaacctatgaactgctggagcctggaaacgagagtttccgggttgtggtccggagtatgcatctgggcaggttattattcccttcctgcatatgcgggagtaacgattcggggtatcgaggataaatagaatcgagcgagcactgtttaataatcaaattggctatagaggttatgcggcagagctttccctatgggaaagaaactctgccgtattcctgtggagccaatatagcgctatggatgctttacaaataaaaataatagattggagagaggacaaatgacaatccgcagaggagatattttatgggcagatctcggtatgtttcctacaacatctgttcagggtggagtaagaccggtgatcgtagtaagtaataataaagccaatacatacagttcagtcataacggtagttccgctgacatcaagaatttataagaaacggtatttgccaacacatgtatttatcagcaaatatgatatgacgggaatccgaaaaggaagcctggcactggctgaacaggttatgagcatttctacgaaatgtattattgagaaatgcggaagagtaaataagtggagcctggatcgggtactgaaagcagtacagattcagatgggaatggaaggagaagggcatgacggcagaggaatatagaaactatctggagcaggatttcagtgatgtagatatcaatgaaatgactgatctacggatgataaaagcagacagaaataaatcgcttcaggaacggagagatatttttctgaataaagtaggaaatccatatttggtccggatcggcaatatgaaagtaaaagtcagatttgccaataacggtatatctatggagcaggcatttgagaatatgcttctgagtgtctgaaaaagtactggcaagattgaggggactgtgttagaatgtcagtaaggacaaattatgcagcccccttttattacatggattttctgacgtaataaaaggaggtaagatatgtatcagaatatcaataaaatctatcatgccgccatctatgtcagattatctaaagaagatggcgatatttccagttcagcaaaactggaaagtaacagcatttctaaccagaaagctttgattctggatttcctgaaagacaaaaaagatatagaagttgtttcagtccgagttgatgatggctactcaggctctaattttgagcgccctgcattccaggcaatgctggaagatatccggcgtgggattgtagactgcgtagtggtaaaagatttatcacgatttggaagggaatatattgattccgggaagtatatcgagagattattcccggctcttggtgtgcgttttattgctatcaatgataattatgacagtcttaagggaaagaatcaggcagacgaaatcattatcccatttaaaaatttaatcaacgatgcttattgtcgtgatatttctattaagatcaggagtaatcttgagattaagaggaaaaaaggtgagtgcgtgactccgtttgtagcatttggatacaggaagacaaagacagataagcataaattagagattgacccatctgcaggcagtgtagtacaggatatttttaagatgaagctgcggggaatgagtcaggatgcgatcgctaatcgtttaaatgaactgggtattctttccccatttgaatataaaatcagcagcggcagtcattatgaaactggcttccggcagaaagaacaggcactttggagttccgttacagtccgtaggatactggaaaacgaggtttatatcggaaatcttgtgcagggaaaaaggacaacaccgaaccataaagtgaagcagacttatgtgaaaccggaagatgactggatccggattgagaaaaatcatgagccactggtgagtgaccgtgattttgaaattgtgcagaggcttctgggcatggatacacgtacttcaccttaccaaaagcaggtatatctgttgtccggaattgctgtatgtgcggattgtggtgcacctatgacaagaaaggtttctactgtggcagggaaaaaatatgcttattatctatgttccgcaaataaagaaacaaaacgctgttctagtcatagaataccggaaaaggatctggaagatgccgtactggtgatgctgaaacagcatatccagaatatcctgcacctgaaaagagtcctggaatttgttggtactgtgccatttcaggagatcaatatgaagaagctgcaggacaggctggagaagaaaaaacaggagacagaacgttgtaaggagttacggatgatgctctattcggatatgaaagagggcattgtatcaaaagaagactatgtagagcttcatgcagcctatggaaagaggcttagaaatgcggaagagagtatccgtgcaatccagaaagaaatggatagtgagctggaaaaagcagacaatgccaatacctggctggattattttgtgaaatatcaggatattgaagaactgtcccgcacagtggtggtagaactgatcaggaaaatcagagtatatgataaaaagaatatagagatcacttttgattttgatgattgttatcagacattgctgaatcaattaccggctatgggagttgatacggtagtagatgatgataataatctgcaggtcaaggtaaaggaggttgtataaaatggcacgaaagagtaggaaaaacattccgacagtagtcggcagtgcaaccgtccagacagaggtgagaagaccattccgggcaggattgtatgccagaatttcaatggaaacagaagaaacattagaaagagggacgatagaaacccaggtggaattgatgaaaaactttgtagcagatacggaagatatttcggttgcggaagtttataaggactcagactattcaggtacaaattttgaccgtcctggattcgtacagatgatggaagatatcaagcatggaaaaatcaattgtgttattgtaaaagatttgtccagacttggaagaaattatgtcgaaaccagcaactatattgaacgagtatttccgttttttcatgtaagattcctggctgtgacagatgatttcgattccttcagagaaggtgtggatcttacagttccactgaagaatattatcaatgagttctattcgaaagaccttgccaaaaagagcagcagcgcaaaaaaagctctttggaaaaaaggaaaatttacaagtgcctgggaaccgtatggttacagaaagtcagaagaagaccatcatcagctgatcgttgatgaagaagctgcagaacatttgaaaagtatattttctatgtatatggatggcaggaactatagtgatattgcaagacagctcaataaagatggagttttatcgccgactttacagagaaaattctataaaaccggtgagaagccgcttccggagtcaaaaccctggaacaattatgaagtgaaacgagttcttcaggatgttcattgcacaggtgattctgtatttggaaaatatcagcaaagtgttttccagggaaataaacagagaaatcgaccagagagtgaatgggtgcatgtggagaacacgcatgaagggattatagatagagagttgtttcaacaggtacaatctaaaatccaggaatatacggaagcttataagaagaaacatcagcagaacaatggggctattagaaaccataatttctatacaggaaaaatatggtgcggaggctgtggcaaccgcatgacgttgtccagagaaagaaatggcacattcttttatatctgcggagccaatactaaccataaatccggaggaaagcaatgcaaagggcacagagtcagaaaagaatatgtggatgacgatgttcttcgcctgatccaaacgcatatgaaaaccgtattggatacggaaaaaatgattcaggaaatgaatacagcttccaaaaatcagacacagtacctgcttttggataaagaagtggggaaacttcgacgggaactgagccgtatcagtaagcgtaaatcggatttatatgaagattactcggaacgtttgattacagaagaagagtacatacagttttctcggatctattccaatgaaattgagaatatcaagagccgtctggacacagtattggcggcacaggttcggtattcccaggattaccacattgaagaaggctggggaaatgtgatacatacttatatgtcaaagcgtaagctgacaaaagaaatggcagatgcctttgtggattcaattattatccatggtaagtatgattatgagatcaagctggtatatgacgatcagtttgcagatttacagaaattaaagaaagagaaggaggcgcagacaagatgacagatcatagaaaaacagctgtttacatccgtttatccgcagaagatgacaatgtagatggcagagccaaaaaagagagcgacagtgtaacttctcagagaattctgttaaaatcatttgtgattgatcagctgggtgtagctgagtcagatatcctggaatatgtggatgacggtgtcagcggtactcattttaaacggcagggatttcaacagctgcaggatgacatgaaaagcggagaaatcggctgtgtagttgtaaaagacttctccagatttggaagagactatctggaagttggattttatattgaatatattttcccacttctacagattcgatttatttcgattaatgacagctatgacagtgctgcaagcagcggaatgactggtggaatgaatgtggcattgcagaatctggtatacaatatgtatagcctggatttgtccaagaaaatttcatcagcattgcagacaagaacgagaaatggtacacgccttccggtaaatgccagatatggctataaaaaaggaaaagatggaaggctggaagttgatccagaggctgcaaaagtcgtaaaaatgatttttcggatggcagcggaaggaacaagttttgcagatattacaagggaattgaacagacaggagattgtcacttgtgatgagcagaaattatcaagaggggaccaggtacagttccagaggtttgagacgatcaaaaagaaacactggagccctacgacagtagcggcaattgtccgggatgagatttatattggaaccagaatctggggcaaaacgcgttgtagtatgcatactggccataaagctgttctgaatgatgaaacagaatgggttcgcctggaaaatcatcatacggcaattatagacaggcaattgtttgaaaaagcaaatgaaatgcatccgaaaaagaagagaagtgttgcggaatcacgcaccaattttactctggaaagacgtaaaaaacagccggcattgctgctatgtgccaactgtgggcattctttactaaaagaaacggagcatctgctaaaatgctcagatgctcgaaccaatggagatcctgtgtgtcgaagtctggtgatccgacgggaaccgctggaggagaatatccttgggcttgttcatcagtatgcagcgtcaatgttggaaaaagaaaagaaagtatcttacaacaggcaatgcgactacaaagagatcaataccgcagaattgcaaaagcagagccgacagttgacctcggaaaagatgaaactctatgatgattacaaagatggtcgtatggatcgtgatttgtataagcagagagcggaaaagataagtggacagctggatgaaattaaacgaaaaatagaagatgcggagaatagcaaaaagtttcttgaacaaaatgaactttctgataaaataaaactaaaagatttcttgggaattcagaagttcgatacagagaagctgcgtgagattatcaaggtgatccgtgttcatagtcaggatgaaatcgaaatcgaatggaattttgacgatattttttcagaacagagataacttgagcaggacaaaaatgacttatcagaagataataaaggtgctgggactacctgatggaagcgtcagatagtcttctgcagaaaaaaataaaattttttttgtcctatacttgacacatccacattcgctcagacatacatttacaacaagaatgtgtgaagcaggtgtaaatataaaagttattcaggatacactcggacataaggatataacaacaaccttaaatatctatactgatgtaacaaaggaactaaaaagaaccgagtttgatggactggataaatactttaataattcaatagcgtaggaaaaagtggcgtactttaaaatgaaaattggtacgctgctttttttggtctgattgacttattcaataataaagattataatttagtaagtaatccgattgaagaacccattctctcaatcgggatttacatcaaatacatcaaataatacaactgcttatgcggaaagtaatcaattttaaaggtaaacaaggctttttatctggttgaaaaaagcaaagtagggagttgctcaggaatatgagtggcttcggaattgcgtcggagaaagtcccgacaatgaagagtcttgactctgacaaaaaagcaggaaaatccggagcaggagaagaagcaactgcaaacgacaacaacggattcttcacagacaacgcgaagattgacttctccaacgtaaaggttgagcctttatttgaagaagaggttgatttcgatacattcagcaaatctgatttccgtgccgtaaaggttaaagagtgtgtagcagttccgaagagcaagaagctccttcagttcacactggatgacggaacaggtacagaccgcacgatcttaagcggaatccactcttactatgagccggaagaattagttggtaagacactgatcgcaatcaccaaccttccgccaagaaagatgatgggaatcgagtcttgcggtatgctgctttcagcagtgaataacctgaaggattcagaggatgaagaactgcatcttctgatggttgataatcatattccggctggtgccaagctctattaagatgtaaatatatgaaagtcagttactccgttcaggactttcatagtaaatagacgggacgtacttcatttgataaaaaactaaaaaaacagcgatttacatcaaacttacatcatttgatgcagaaatcggtgcaagcaagaaaaatcgtataattagtgcaatgagtgggcaattccaatcggagttgcccatttttaaaacaaacagaaataaaaatcggaatttggaggatgtgaatgagtagcatgaagaaaacaaaagaaggaattaatttgaaaaaactccttaggctgaagaatacaggcagtatctttgtgattgcgggacttttgataattttggtaatagcgtcgtacacatatattctgcaaagttcttacactaagaccgcccttgaaacagaaatcacacgtgacacagcgagtgcagatgcagtacacaaacttgtgaatagaagaatcggcaaagaagattttgatcaaatcaaagatcaatctgatgaaaagaagcaattatataaggatatttcttcatatttcaatgaaatcagaacactgaattctactcgatatatttacaccgctacaaaaaatgaagaaggaaaactcgtttatgtggtagacggtttggatccggatgcggatgatgtaagacaccctggagattatattgaggaagaaatggttccgtatattgatagggctatttctggagagaatgtgtactctcaggatatcattgatacaacatggggtccgatttttacggcttgctatcctgtaagagcaaatcatgatgggacaggagaaatcattggcgcattttgcattgaaatggatatgcaatcagcttatggaatggttgaaaagacgaatcatatttccatcatctgcggtttagtcgcaggagctgtattgcttttaatttgtctatatacctattatgtttaccagaaaagcaaggcagaagagcaaaaacaaaaacaattattaatgaccgccgctgaggaagcaaatgctgccaacaaagcaaaatctgcgtttttgcttagtattagccatgacatcagaacgccgatgaatgccattattggatttacaaacattgcgcttcaccagaacacagtttcagatattcatgatagcttggagaaagttcaaaaaagttcgaatcatcttctctctttgttgaatgacgttctggattttactcgcattgaaagtggaaaagttactatttcgcctgagccagtggacattactcaattgacagataacgtccaggcgattatgaatggacttctttatactcgaaatcttaagtttgaagtacatcgagaaatcccaaagaactcatatgtccttgcggatgttgtgcgtatccgggaagttttagtgaatcttcttggcaatgctgtgaaattcacaaaggacggcggaaagattactttggatatcagcagttacccaggagcggatgagaaacatatcataactcgttatgttgttcgagataacggtattggcatgagcgaagagttccagaaaaaattattcgatccgttttcacaagaagatgatgctaatgccagaactcaatataagggaaccggtcttggtatggccatcacaaaaaaatatgtggatatgatgggtggttcgattgctgttgagagcaaaaaaggtgtaggttctacattcacagtggagatcccactggagttgccagaacaggttattcaatcagaacaaaaacaacatctgcatagagatttgacgggtattcatgttcttatggctgaggataatgatctaaatgctgaacttgctgcgataatgctggaagatgctggtatgaccgtaacacgcgcatcagacggaaaagaagttgtgaatttgtttaaaaatcatccacgaggcacatacgatcttattttgatggatattatgatgccaaacatggatggacaccaagcagcaaaagccattcgagccttgggtatagagcggtccgatgcagttacgattccaattatagctttgtctgcaaatgcttttatagatgatattcaggaatccctgaattcaggcatgaatgaccatatttccaagccgattaacatggaggaattaatcgatactatcactaaatacattaaacacgattagaaaaacaaagaagttaattctgatgaaaagtttgcactggtcttgtcggatgcgaaagcgcaagtttcctatgattatgatacgggtcgcatcaccacatttcttatcagcacccagcaccaggaggacaccgctgttatggatattcgcccgctggcggaagctgtcatggaaaccgccgggaaaatcaagaacgacaatatgtccgatcaggatttctacaaattcaagtttgccgaaatatatttctaactttccctattttacaggctttccagcctgtgcattagcgaaacgatatgtattttcccttatttttgcccttatgagataatcgtaagggaaataagggaaagttttatttagtcattgcctgccactttatcaagtaaccttgcagattcccgcttggcttttcttgtagagtgtgcatagacattcatggtggtactgacatctgagtgccctaacagttcctgcacatcctttggtgctgctccatttgccagaaggttgcttgtgtaggtgtgtcgcaactggtgaaaatgaaatccttcaaatccatccagtttctgagcaatcttcctgcaaacaattcctaacgtgcttggcagttccaaacttccatccggtcttaagcagacaaaggatatttccttataatcttctggaacattctctgttccgtccagatgatagaactcatagtaaactctgtttttgtcttttacttctctgtagtagtttttgtggtaaagttctccgtactgcattcggtttttaagttgttcctttcgggcattgcgaagaatctctgccagtgtatctccaaaatcaacaatccttaccttttttcgtttggttggtccgatgatattcttgtgccttgaaccatcatatcggatacttcgtctgatcgtaaggcactgttcttcaagatttacatcctgccatgccagaccacaggcttcaccgatacgaagtcctgcataataagctatctggattggaagtattgccggtggattgtaatcctgtagaaattcaatcagtctttcataatcctctcgtggaattggctgtatatcgccatccatgtcatcatcagaaaacaggtcaacctcatccgtctggtatttcagcttaatatactgcatcggattgaaagtgatatattgctttggggatactgcaaaccggaatgactgctgtaatactgccgagaaagaacgaatgtaatctttgctgtaaccttttctttctgaaccatctggataagtgccaccaaaggaaagcagatcgaagaaggcttgtaaatgctcagatgttacatttttcaactttctctctgaaattggatgcttcttgatgttggtaatagcaccaaggtaattctggactgtcccattactgagagtaccggtctttaattcttcctctgcccatatatcaagtaattctccaactgtaatattttccgactttgcaatgaatttcttgctttcgtaatcgtccattgcctgacggagcagtttttccgtttcacttttgctttctgttccagcgtattctttctgaaccagattgccgcttgcatcttctacatagaagcggtagtaccatttctttcctttttttcttacagatccttttgccataatcgtgtgtctcctttcgatatcagacaatcggaactgatgaaatgcttcttgcgtgtaagtatatcataactccggttgtcgttctataccgaatcggaatcctcatacaaaacttctgataaaagattttcaagcctttgttctgccatttccggtttcttggaataaagccttacgatatctgccatgtcgttaaaggcattaacagtgtgggtgatctcccggagaaacataatctcgttatattcatcattcgattcaaaccccattacttttgcaatatcagcttcattcgtgttgcccttgtaattcttgcaggcaaactggaatgattccagaaacaggttatattgctttaacatcaacagcagtaaatctttggaaaaagcatcttcctttttactaagggcgagaggtaactgtttgagaatatcgcccattgcatcacgaatctgtaattctttcttatccgtaatatcggtttcgtattcatcggtttcccctctgagccattcaatagatacatgaagtgcttccgaaagaccttccagcaccatctttttggtattgtcaatcgaaccattctcataacgcaggattgtggaagcggtaactcccatcttctctgcaacataaggctgtgtcagatttaattccaaacgacgctgttttgccctgctgcctatcagcttgcgtagttctttatctttcatgctgattgcctcctttttcggtatgtatgaattatagcatgtaccttacataattgcaatatgcaatttaatgattgtttttaaaatttcataacgcttgacaacgcaatataaaaccgctatactaacagcacaacaaaaattgcataatgcaatttataaggaggtgacaagatgacggaaagaaagattgcattatccatcgaggaagcagccgactatacaggaattggcagaaacactttgagaaagctggttgaatggaagaagcttccggtattaaaggtcggaagaaaagtccttattaaaactgacattctggaaaagttcatggaagccaacgaggggcgtgatctgagggataaaggaaatgtaaaagctgtcacaagaaatgtggcaacttaaaaaggcggcttcctaagaaaccgccaaaggttctatcagaccgaagccatgatatacctacacgcaagaggattataccatgtgcttctcctgatatgcaaccgggaactgttgtttatcggaaaaagaaaggatgaagacgatatggcgaaatcaacaaagacttatgaagaaagaatacgtgcattagagaaaaaggaacaggaaagcattgaagctacaaaaaagctcattgcacagcggaaggaactggaaaagcgaaagaaagcagaggaaagtaaaaaacgaacccacaggctctgtcagattggtggcgcagtggaatcggttcttggctgtccgattgaggaggaagatttaccaaagttgataggcttcttaaaaaggcaggaaacaaacggaaagtttttctcaaaggcgatgcagaaagagccacttacagatatggaggaagtgtaatggcggagggagtggtttttccattcccttcattgcctttgaatgaagggcgcacttatggacaaccagaggtcgtccttataagtttgccacaagtggcaaccggtctgcgcttacgcttgccgggctcgttccgtcggcggggctttcagccagacctgctcatgccgcagggggcactcttgcgcagagggcgttccgacagcttcacttctgccaaaccagaagaagatgctgtcggaaatcaatgccggatacggcagaaagggggaatcgtatcatggcgatatttcactttacagtaaagattgtcgggcgcagtaaaggaaaatctgtcatatccgcatcggcatatcttaatggagatgtgatgaagaatgaggaaacaggcagaatcagttactatacttccaaaaaggaagtcgtctacaccagtctgatgatgtgcgaaaatgcacctcctgaatggctgcatgtaccggaagaaaatataaaaaggtttcaacagtctatccgttataaaagagcggatgataaagatgccgcactggaaaagtttaaaatcacatttcagaaacagcgtctatggaatgaggtattgaagatagaaaaaaatgcagatgcacagcttggacgctcatttgaattttccctgccgaaagaatggagcagacaggaacagattgattatacaaccgaatatattcaaaagactttcgtggataagggaatgtgtgtcgactggagcatacacgataagggcgatggaaacccacatgtgcatttacttgtaaccatgcgaccattcaatctggatcattcatggggcagcaaagaagtcaaggactgggattttgtcagagatactgacggaaatatcgtggttgatgaatcccacccggactggtggcaggataagaaaaatcctgaccggcatggaatccgcattccggtacttgatgaaaacggagtacagaaagtcggggcaagaaaccgaaaacaatggaaacgggttctgaccgatgctaccggctggaataatccaaagaattgtgagttatggcgaagcgaatgggctgggatgtgtaaccggcatttatccatagacaatcagattgaccaccgctcttatgaaagacagggcaaattaaaaatccctacgattcatgagggtgcggatgcaagaaagattgaggaaaaatatctcaccggacagatatggaatggttcatggaaggtcgaggaaaaccagatgattaaaaaacaaaatgcactactgcaaaaggtaatcacaacctttggtaaggtatccggtgcattgtcaatatggaaggagtggttgaatgacattagaagaaagcaaagaagtaattcccatgatggaagcaatgattacacagatagaggaacagcagaatatcatggcagaaatgcttcaggaaatacaggaaaaggacgagaagctgatgtgctttcaggagaaggaagaacgattgcagcaattagagagcgaattatcagaactgcttcaaatcttgccggatacagaagaactgttgatacttctggaagaaaagacagaccagatacagaagcttacagacgaaaatcagcaatggcaggaattggcacagaaattaaacagcgagaaccggctattgcagaaacagaacagcgaattactgaacttgaacagcaattagagaaaggaaggtcgattgatgaacgaattaagaaactcaaagagcgacgatcaactggaagagttgcttctgctgacagagcagatgcaggaagaactcgaccagaaagaccggactatcaggaaactgaaaatgcagctcgacgaatcgctgaccttgaacgagaggttaaacagcgagaacagagcagggaacattcaagccttaaagaacgacttgaggaaaacaaaagaattgttgcagagagagaaagagaaaacgcacgctgccgaaatcatgacagaggaatgtcaagataagctaaggcaggcagaacaggaacgggactatgcactctctcatcagaaaaaagtagagataccggttgaaaagccggtactctatcaaaagtgtgggaactgtaacctgacagcttatctgaaagccaaggaaaagtatgatacgcagagagaaaaactggcaggcagatataaaacaaaaacagccatgtatgaagcattgatgtttctgctgatatggtattccgtatcaactactctttttcagatgatacggtcaaaaatatttatttctgattgcgtggtattctttgatacaatcgccacttttatacagaccattgcagggtggattatactgacaggaaagaacatggcacagattagtaatggaatatccaatcctgtcgttgccggaattgtatattggctgataagaatactgatctgcggtggatgtttggtgggtgctggaatacttttagcattcaccgggataaagattgccgggctatataagaaatactgctgggatatgattacaatactggtaacacttataagcatggcaatagcaatctattttggagattggataaagacagtattgccgatcaatctgctatttttcttattattcgtgcaactggtatatgttggaatcaggtggtatgtaaaaggctggcgggaaacaaggggatattattaaaaatccgattgtaaacacacaattttatatatgtgcttaatcacacctctttgtattttaataaaatcctacaaaagctttgaaaacaaaggattcattgtaatgtgttcgctttatccctttatatgatttcacactatgttccccttgccctgactgttcataatggtaaaagcaagggctggaaaaacgcataacgcaatacaacaaagtgtagcaattgggatattatgaacgaagaaatcatcttttcataagcagtcaataaggctgaaggaattaatctctgccgccttattgactttcaggtgggcttcaattataattaaatcagctgatttaaaacaagcgatttagtaaaaggagagataaagtatgccaccaaaagccaaatttacaaaagcagaaattattgaagccgcattaaatattgtcagggcagacggatatgaggctttgacttcaagagcgttaggaacatatctcggtagttcggcaagacccatttttactgtatttaaaaatatggaggaggttcagcaggatatgattaaatctgctaaagctctgtataaagaatatgtcaataaaggactaacaacagagcccccgtttaaaggggtgggtacacaatatattctcttcgctgttaatgagcctaagctttttcaactcctctttatgacggagcaaaaacaaattcctgacttatctggtgtacttccgctgatagatgaaagttatgagcaaattctattgtcaattcaagatgattacaaaatttgcaaggcagctgggaaaaaactgtatcatcatctttggatatatacacacggaattgcaacgctttgtgccacaaaaatgtgccgatttacagacgaagaaatcagtacaatgattactgaggtatgtatgagtattttgaaaaagctgaaggaaggagaaaataatgattaaagcgagaaatataataaaatcctaccaaaacggagaaagccgattccaagtattaaaggacatcagtcttgatattgaggataatgattttgtggttattctcggcgcatctggttctggcaagtcaacctttttgaatgtaatttcaggtcttgaacgccctgacagcggtaaagtgttttatgacggaaaggatattacagcactttctgataatgaattaacttcatttcgtaaggaaaatgtcggatttatttttcagcagtattatttgctacccaatatgagcgttgataaaaatgtaaaaatgggtgctgatttagcaaataataaagattataaaaacgtcattagagcggttggactcggagaaaaactacataaatatcccagcgaactttcgggtggcgaacagcaaagagtatctattgcaagagctttggcaaaaagaccgagagtattatttcttgacgaaccgacaggagcattagacgaacaaacaggacgacaggttcttgattatatatgtaaacttcaaaaggaatatggttttacgattgtaatggtaacgcacaatttgaatattgcggaaatggcaaacacagttataaaaatgaatagcggaaaaatatctgaaatttacacaaatgaagcacaaaagactgcttatgagatagggtggtgatggtatgctcgttggaataaaaaatgtttcaaaactcatcggtatttccattatagcctgttgtgctgttcttgtttgtacaatgtttctgaacttttattttgatattcgattaattgagagtgaaattacatctgaattatcaatgtttttttataatgctcaggtttctaccgcaaaagtcgtttgccttgtaagtggcggatgcttgcttttaactgcgattgttatgttgttgttttatattaagcattatattgacacgcataagaaggaacttgggatattaaaggcgttgggatattcaaatatcaaaattgcaaaaagcttttgggtattcggaattagtatatttattggaactgtaaccggatatgcaggagcatttcttataatgccgtggttttacgctctacaaaatgaagataaaatgcttcctgagataactatcaattttcatccaagcattttattttattttgtggtattgccaactgtgtgtttttcggcactttcagtttattatgcctggtacaaattcaaaaaacctgtgttgctgcttttgaaagataatatgcaaactgcttctaaaacaccaaatcatagaatcgaaaaaagcagtgaattgtcgtttgtagagtatttgaaaaggaataccttgaaatctaaaaaggcacttgtattcttcattatttttgcttcgttttgcttttcagctatgacacaaatgtcgtttagtatgaaagatttatcaagtgaaatgatgggtgtgatgatgttggtcatcggacttgtattagcgtttacaactctgtttcttgctataactacagtaataaacggaaatacaaaaactattgctatgatgagagtattcggctattcacagaaagaatgttgcagggcaattttaggaggatacagaccgctgtcctatattggttttataatcggaacagtatatcagtatggattgcttcggcttatggtggatattgtatttaaggatgtcgagggtgtacctacgtataaatttgactttcctactatgcttatttctcttgcttgttttatcacgatttatgaaattatgatgtatatatattctgaaaaaattaagaagatttctatcaaggaaattatgattgagtaacaggggaaaatacatacaaacaatatggatacagtgccctgtctggtgaaaaaaactgaacaatgatactggaaaataccaaatttaaaagtttcatctgcattgtcagaagtgaaaaaatatagaataatagggacaaataaatctaaaagggttatttgtcccttatttatctttgaattaaatttctaaggaatcttccgcatctacccacatttgcatcgttccatcaagatacaatcttgcatattcaagtggttcatcaatagcaagtgcatttaatgcacaatctgatccaggtgttgtttttaaattcttttctgcttcccagcagtcaatgcggagcatatagccagcactggtatatacatcaatgctgtttctgtgtggattgtattctgcaaatatcgttctcatcgtatcaaatctccttatcgttcaatcaatcatttgttaaaaaaatagaagcatttcaatcagttcaccatgtcgttttaattttgtgttatactgttttataggattttcttgcccttgtatttgcccttatcagagttcgtaaacactggtgggacaatataatacaagggaaacaataagggaaagctcacctgcgataaacttagtgttttcaagggcttgagagatatttgataataaaatataacaattattaaattccttggaatacatgaaatctcaattcaagtttggagaattgagaaaattggaatttatcaagctgttaattttgaaaatttctttgaaaaactattgactcctacgcaacgtaatagtttacgatatgtttatcgagaggaggaaatgacaatgatgacagtgaatgaggtaagtaaattaacaggagtgagtatacgcactctgcagtattatgataccattggtctcttaaaacctattgaatatacagagtcaggttataggttgtatgacgatacatccttggaaaggctgcaacaaattttactgtttaaagaattggaatttccgcttaaggagattaaaaagataattgatgcccctaactttgacaggaacaaagcattagagcagcagattgaattgctaactatgaaaaaagagcatcttgaaaatcttattagtttcgctcgaggaataaaaggaataggagtgaaatatatggattttaaagtatttgatacaacaaagattgatgagtattctaaacgagcaaaagaacaatggggacaaacctctgagtataaggagtttgaagagaaaacaaagaactggacgaaagacgatgaagctactgttgcaaatgagtttatgcaattatttgttgaattcggacaaatgaaagaaatggacccagaagatgaacaggtgcagttgcaggtaaggaaacttcaggattacattacagatcatttttatacatgttctgataagattttatgcggttttggaagaatgtatgccggtggaggagaacttacggaaaatattgatgatgttggaggagttggcacagcagagtttgcaagtaaagctattgatatattttatatgagtagaaggtaaattccagttgtgcgcccagctaagggtgtgtagtcaagccggtgggattccggtttatccaaggtttagtcaaccagataatagcgagtcttgggatgatgccggtaacggcatctgacaagcgtagacagcaagaaagcaggggtggtaggtggtcggacaatcccatagtactgtatgttttttgtcaagcacttttccctaaaaaaagcgtcagaattccctgtttttagcgagggattttccctactttaggcatcccgaacacgacggttaagacttaagcggccgatggtactttgctggagacggcacgggagagcaggtggctgccagtattttaaagaaaacagacctgagagggttttaaaatatagatagaaggacatagctgagaggcagcacgtcagggacagagataacaatgtaaagtcccggcggatgggtccgaatcccatggatgttcatcgtaaagcatttctaaaatcgcattcttaggtctcgcccctgaaacctgctgtacaatcttcccattcttcataaccactaaagtcggaatgctcataatactgaacttatttgccagttcaggctcttcatctacattaatctttccaactttaatatctctacgctcacttgcaatctcctctacaataggtactaccatgcggcaaggtttttctattttgtatggaatttacccctgcaaagtagaatttacttctgcaaagtagaagttacttttgcaactcacctctttatgagccaacctttttacaataatcacttatctttatgaaccaacctttttataataatcacttatcttatgaaccattttttacaataatcacttatttattatgtcaaatgccaaaagactgattttctttcactactcatggaaaataaaagaaaatcagcctcatgctgtacgactctgtattattttgtaactgttcagagccaagcaaaatttcaaaaaacaggtataaaatgcttgcatttttaaaactgtttttgaaattttatttggcggatacgccacaccgacgaaatgcgtagcattttggaggttggctctgaacagttacgttattttaatttgaattccatgtaaacagggtcatggtctgaatagctatatcctgtatccacattctcatatgtcagacattcgatattatccgacacaataaaaccatccaatgtgacggtataagttacatccggcacatatgccatatctgcatttctggcactgttccacatagcattacgttcttcctcacttaaagcatcaatacaaaatgagaaatgctccggaagtgctttcctcggaaatggatacgcccatgattcatgttcttcctcatcaccatcagaagccttcagatcatgattaaaatcgccgccgcataatacatagttgccgacttcatattctttctgcatatccgcactgagcatggcaatctgtccttcgcgaattgcatcactgttgccgtatgctgacatatgtaagacaaaaataacaagttccttgccattgtctaccggcacccttgaaatgctgtaacatctgtccagatctaagaatttgctgaaggatgtcgatatcggcaagcttcttctcaaagcggatgtcaccggatactttgaaaacaatccgatgccggatttgctgcttccatgtggctgtgtaaacggataaaaaagaaatgccgaatcataattctgcgcaaatacatagtaatcgttcggaaagcaattcctcagtatatcatattcattcacatgatagctccttgtagaatccagatcgatttcctcaatcatcgcaaaatccggattcaaagatgctgccagatcacctgctccctgaacagtatctaaaacacagtctttgcttttggcccaggatgattttccaccatccataaaaaagctaaaatccggtgtatatgcaccaaagccgatattgtaagttaaggcactgtactgctctccggttgtcagattcttcgtctcctgctgcccgccttcatctgaggtctccacctgtaaagccagattatcctcgattctgtgatagcttataacaagataaagcagataaatcactaaaataagaattactgccagcaagattatacctgctgtttttaaaattctctttgctgtttcattcatttctttgacccgtacctattctaaaatctatgtatcctaaattctacaaataccaattattatccttaggttgtccagcaaaattctcttccagcattctgatatgactgatcagcgatggatcatcaaagaatcttgctcctgttggacatttgcggacacaggcgtgacatttgatacaaactcccgtcacttcttcaacattctctcttgaaatgcttcccattggacagacttcagcacatatcttgcaacgcgtacatatctcattatgtacttttggctttgctttcaagaagttggccggtgtaccatctgcctcaaggggcttataataaggcccaaccgggttgcttcccggaagtctaagatcattatagttctccggttgtgtcatgatcttatggaccacatccgcgccaaactgtccggctgccttcaaatcttctgttcccggtctgcctgccgataaaatatctgacatgacatgccgagtcacagcacttcccgcgccatataccttaaaaccattctcccgcagcagcagataggcctccatgacggaatgatcaatacttctgccgccataagtcatcacaatcgcagctgaagcgccatgtccgcaaattctgtcacgaataaaaggcatgattttgttcggaattcgtccggcatacgtcggacatccaaaaataaccaaatcttcctctccaaaacaaaacggatgctctctcttgtccggaagcgtaaaatcatacacatgaatctcgccaatcttcagcacccctgctgcgccttcagctactgccatcgttacctgcttcgtctttcccgatggactgaaataaaccgcccaaatatgttttatcatctgtccccactccccgttttattttactaaatgatccagataatgaagcaaaaatctctctgccagtgaattcttcttgatattggctcttgcttcatcaaatgtaaaccacttgaaattgtctacttcttcattgaccttcaaatcttccggatgctcgatcatacatgcaaaattcaccatcagtgtattagatggttcaaagaaagaagtcttattgaactgcaaacgatccaccgtcatacctgtttcttcaaatacttctctcttcaccgctgcctcagcatcttccccgcgtgaaatataacctgctacaagaatgtaatccggtcttccatactgcttgatcaataaaatcttctgattcttcacatctatgcagatcatactgactgccgtattgaaaatcggaaaacgaaactggttacattgactgcagaaagggatctccccttcattctcaaggtggcgcaattcaagctttgtaccacactccatacaataattcatcattggtttatcctccaaataatctggaaattcttactgaatttcttgatactaattatacaaatactccgccagaaacacaagaaaaacgtcatagacatcttcactgtccatatcttcaaaatctattctaataccctgcctgtgcatataaaatcatataaatccttgacatttctaatgccaataacccgaataccggtattgctcctgatgtacttcatattactctgaggaatgcagcatactttaaatcccagtttctctgcttcccgtactctttgttctgcctgactgacagctcttacctctcctgtcaatcccacttcaccaaaaatcatcgtatccgattcaacggctgcattgcgataactggagataacagctgctacaatcgccaaatcaatggccggttcattcagacgcataccgccggccagattgatataggcatcacagccggccagtttgagtcccaaacgtttctccagcactgccagcaaaagattcactctgttatagtccgtaccagcagctgtacgcctcggaatctgaaaattcgtctgacagacaagggcctgcacctccagcatcagcggtcttgtaccttccatggcacacgccacaacagaccctgctgtaccttccggtcgaccgctgagcataaattccgacggattcttcacttctgtcaatccctcactgcacatctcaaatacaccaatctcattggtagagccaaatcgattcttcacagcccgaagcagtcgatatgaagcatgtcggtcaccttcaaaatacagaaccgtatccaccatatgttcaagcacacgcggtccggcaaccaccccttcctttgtcacatgtccgacaataaaaatcgcaatattctcccgcttagccagctgcatcagtacactggtagcttctctgacctggctgacacttccggctccggaactgatagcttcacgatacattgtctgaatggagtcgatgatcaccacttccggtttatacttcagaatcgtctcctgtatcacatccagattcgtctcacacagcatcgccagatcattcttaaacacccctagacgatctgcacgcagcctgatctgctgcagtgattcctctcccgacacataaactgtccgacagctctgttctgacagacatctgctcatctgaagcaataatgtggatttgccgatacccggatcaccgccgactaacacaagggatcccggcacaataccaccaccaaggactctgtcaaattccgaaattcccgttggtctgcgcttctcatcacttgaatgaaccgatgacagcagcaccggttcggaagcttttgcctgatgtctaataccgccggaagccgtactcccctttccaatggttggttcctcaacaaaggtattccatgctttgcaggcgggacactgtcccagccatttagctgattcgtatccgcattcctgacaaaaaaatatattcttgctcttagccatttaactactcccgtttcctataaccctacttcttatccaaaactttctgtactcacaacccattctgagcctctatcatctcaaaaaacgaaaagatactgcaaattcacgcattgtgtcatctgcagtatcttttgttcacttaatgaatggtctattgcgaagaatcttccttctctccgctatctacactctgacaaccttcacatgcttctgtgcagatcccagttcaacactcaatacaagcttgccaccaagattcgttgtcatacgtccgatattcacatcatccacaaaaacttcatattcctgttcagcttccagttccagtgtaatctgcgtatcttcaaagccttcgacttcaaattccgttctgacatccgtttcttcgaaatcgaatacagatgttcccggtacagattcatatacaaataattcgttcttctcaagcttcgtaatgtcacggtatgtcttcaccttgtacatatcaccatgaaactcgaaatcagagaccttcttcttggcattcagtgtataatcaccaaagcttaagccattttcgttctcaacacgaattaattcttcaacaactgccatgtccttatcctccagtcacatacatctctgtgtatgtttatcacttgttcataattcaggtaaaactgcctgccatcctattatacatgaaaataggccgcatgaccagagtctttattattttctaacaaatttaatatgattttcatccatttcaagtgcaacggtatctccctggacaaacttgccatccagatattcttctgccatggcatcttcaatctcattctggatcacccttctgagcggacgtgcaccataattctcatcaaaccctttttctgccagatgatcgcggacagcttcagaaaccacagtttcaaccccaagctgctccttaattcttttgctgattgtcttcagcataatatccgctatatccttgacattctccttcgtcagcggatggaaaacaatcgtctcatcgatacgatttaaaaactccggtttaaaaaggtgtttcacttcatccatgacaccggctttcatcttctgataatctgcttcatgtgtatcacccactgcaaatcccagtttcttcggtgtgacaatattggctgctccggcatttgaagtcatgatgatcactgtattcttgaaatcaatttttcttccctgagaatctgtaatatgaccgtcatcgagaacttgcagaagaatattgaaaatatccgggtgtgccttctcaatctcatcaaacagtaaaaccgagtaaggattccgtctgatcttctcactgagctgtcctccctcatcatagccgacgtatcccggaggtgatccaataagtttagacacactgtgtttctccatgtattctgacatatcaacccggatcatggcatcctccttgccgaacattgcctctgccagcgccttggacaattccgttttgccgacacctgtaggtcccaggaacaagaatgaaccaatcgggcgcttcggatctttcagaccgactctgccacgtcggatggctttggacactgcacttacggcttcctcctgaccgatcacacgttcatgcagaatcgattcaagttttctcaggcgttctgactcttcttcttcaagctttctgaccgggattttggtccaactggccacaatgtctgctacttcgttctctccaacgatcaactgctcgctgctgcgaaccttttcccactcgctgttaagacggatcatctcatcatttaattccttctgcatcttcttgatctcactggcccgttcataggcttcatccttaatagcctgctctttctcttcctcaagttccgctacctttttctctaattcttttacttttggggatgatgtgtaagagctcagtcttaccttggagcacgcttcatcgatcaaatcaatggccttatccggaagaaaacgatcattgatataccttgcagacaaatgaacagctgcctccagagcctcatctgtaatggtcacgtgatgatggttctcatacgcccccttcagaccgatcagaatctcaatggcttcctcctcagatggttcctccaccattaccggctgaaaacgacgttcaagggccgcatccttctcaatatgcttcctatattcttcaatggtcgtggcaccgataatctgcagttcacctctggccagtgacggtttcaggatattggccgcatcaatggcaccttccgcaccgccggcaccgataatcgtgtgaatttcatcgatgaaaagcaaaatattgccatcttctttgacttcattgatcacgcgtttaatgcgttcttcaaattcaccccggtactttgaaccggccaccatgccggaaatatccagtgtcaaaacacgcttgtccttgattgtctcaggtacattaccgctgataatcttctgtgccagtccttccgcaacagcggttttgccaacaccaggctcaccaatcaggcaaggattgttcttcgttcttctggaaagtatctgaatcacccgctgaatctcatcatgacgtccaatcaccggatccagtttgccctctctggcataggccgtcagatctctgctgtactgatcaaccattaaaggttcattctttctccgcgacttgcccttggccgacggcatatctgccttcgctgccctggcatccataccgataccaagtacaatatcctgataaaccttctgggcctgcacaccaagggaatataacagctgtgccgcaacacaatctgtttctcttaatatggcaatcaaaagatgttccgttcctatggccgaagctctgaaccgcatggcttcacggttagcgatctccagaatacggcggcttcgcggtgtgtattcttccggctctgccaccattgtctgactgccctgaatcagctgactgaccatgtgcaataccttctcctctgtcacatcatgatcttccagcacctggcatgccagtccctctttctctcgcagcaatccaatcagaatatgttctgttccgatataactgtgattcagttctgctgcaacctcctttgaataatgcatcacattggctgccatttgtgtaaatctatattgcataaaaataaaagcctcctgttgtacattttatctctcactaagaagaaactgcttctgatgcatcaagcaccggcaaatttctccgaatataatctgcccgggccctcccgcgctcactgctgctgatattcttctcagcacttgctgacaaaacagcatccgccatattcagcataacagcaaaagggcatatctctgcctgttccggccaaatatgatacagatcaccggcatggagcagcgacagacaggccatggtctcatcatatccaagctttctggcatacttaatcaaaccataggcacgatacatgggatccacctgactcagacggtcctcgttgaaacactgtctggcaagtgcttcctcctgctccgccaactgccctgccagatgttccagtgcagaagtgatctcactttcagaaaggcccagagtctttctgttgcgcatcctgtaaacactgcccggtgcctctgtctgcccgtcaaaatgcggtctcagtgtaaatccatactgactgatctgtttctctatctgatgcatcacggatttcttctccagatacggcagatgcagcagatatgatgcagacattcctgttcccatataaagtgaactggaagtcagatagccatacttcttactgaaggcatatttcaaatactgattcagacaatcatccacctgccccgccagtgccatggcttcctgtatatgattacctggacaggatacctgtatacaaagatgttccttgccattgacaagtaccgaaatggattcatcctctgatataaggattcccgcttcatggcccttttcaaacatctgcggcggaatggccaatttcccgatcaatgcctgctgctcgtaatctctgacctcagaaaagttaataaacacaaacttcttctgaagaacctcttctgattgacgtaccgcataacacacggctgccatcagggctttctgttcttcctcgttcatcttcgcttcaaaaggataccccattatattgcggaccaggtatacctgaccgcctataatcggtccctgattgcacgcttccatttcataccatttacgcatgttcatccgcctcttttctgccggctctgattatatcacggattctggccgcctcttcatattcttccttcgccacagcccgcttcaatgccgcccggagttcttcctctgttgaaccggcatctactgtaaatgcgatgtcctgttcaacatccttcatctcagcgtgatcagcatctgctgtgatcgacgggatatgtaccgtctccccgccataaagcggttccttacctgtatgttcacaattgccctgtatcttcttcagataaccatccaatacaaagttgaatgtcttataacaatccggacacccaaaggtaccatatttcaaaaattcattatatgtcatatggcaggacggacaaacaagattcgtcttcttcagattctcttcatcatctgtctcctggcgctttccaaggacacttgccagtaaattcgccaaaaatgatgtatccgtcaaagaaacaaatgaatgatccatgccggtctccttggccgcacaggcctcacacaaatggagttccttcttctcgccattaataatctctgtataaaaaacgaccgcctcgttctcatgacatccatcacaaagcatacgctatccctcctccggataattcgccggctgttcataataatcatagatcatatcgatcatctcatgcacttcatctcttgtaattcccttgcacatggcacctgccagcatcacctgcagatctctgagcaatttattgcgcgccgatgccttattgcagtctatggctataacagcacctttcctccggtccagcttcacatagccttcctgtctcaataccgtatatgccttattcactgtatgcatgttgatacccacacggtcagccagctgtctcaccgacggcagtgaatcccccgccgaaagctgagacgtggcgataccgatgacgatctgattacgcagctgtatatacaaggcttcatcactgttaaaatctatctccagtatcatatgctcaccttctcttatgattatattatattctgttcaggcctcatctgtgagtcctgaaggacggacagcatctcctgcacctattatctggcatcaaacattgtccatctgttatacatattgtaacacagatatcataaaaatcaatctctttttgcactacttattcttcccacaatctgatacagacgaaccgcggcgataaccgttactgctgcattggcccaaaatacacctgcaatataaccataaatccccatttggggcatcatgacaaccacaccgaacaaccggatacccgaagcaatcacatgatgcagcaatgtttcgttcatttttccaagcccatttagcgcacctgctaacaaagactgaatgtacataagcggacagagaatcgcaaaagactgtatgtatccccctgcctcaatatcgttaaaaagcagactgccaatctgattaccgcagactccaaaaactaaccctgaaaaaagccccagaagcagacaatattccaggcttttcttaattgctcccgacactgcccggtaatcatgaacttcctctgcctccgctactgccggcagcaaaagtgatgccattgcattggtcactgtattgggaaacagaataaccggcagcacaatacccgtaacaatgccaaacacagacagtgcactttctgtatctccataatattttgccagcatcacaggcatcagaatcatttctgtactttgcagtaatgtcactgatactctgttagctgtcagaagaccgccatactgccacaattgtcggagaatttttctgatcggctccccgctccctgatcccccattttgacttcgaatactaaatcgataacaaatccaagttaaaaagcaggaaaatatttcccccgctgccaatccccagaccgcaacagaagcatcaatttttcccttttggtacatcattgcacccagtagataaatggtcacaactctgacaacctgctctaaaagctgcgtcactgccggaactgcagtatgtctgataccataaaaataaccgccgacacaagtatgtactgctgcaaaaggaatggcaattgccataatcaccagatatccccgacaactgatatcctttaaaatccaccgactgataggctcagaaaaagcgataacacagccgctgctcagtaatgctacaatcagcgacataatcccagccgattttattgtctgtctgattgcctttttcttgcctgtgccgtgataagccgccaccattttcgacacggccacctgtatccccgcgcagctgactgccatacaaaacataaaaatcggaaatatcagctgatagcgccccagttctgcgttggatatcaaatttgccagataaaccctgttaaaaaagccaagcagccgggctgcaaacccggctgctgttaatatcagagttcctttaatcagttctctttttactgacatgaccggcaccatccattttttatctattctatgaatgatggcctaaatcatgtcttgttattttatttatggtaaggttcatgattaataattcgatagctccgataaatctgctccagcaaaatgacacgcatcagctgatgcggaaatgtcattggtgaaaaactaagtttttcatcggcacggtttaaaactgccggagccaaaccaagagaaccgccgatgacaaaagtcaaatgactttcaccgccaattccaagcttctcaattctcgccgccagctcctcggaactgcgcattttcccttcaatggccagagcgatcacataactatcgtctttaatcgactttaagatacgttcgccctctttttccttaatctgcagttccagggcttcactggctttgtccggcgtcttctcatcagccacttcgatgatttctaatttacaataacggcttaaccgcttactatattcttcaatggcctgtacaaaaaatttttctttaattttaccgactgttactaatgtaattctcatgctttctccgttctgtatgtcatccagagttcttccatttcttctctcggcaatgttttcaaatctcccaccaatgaaaggctcatctgactcagatcaaaatgtttctgaacaaaggcccgtacttcttcagccgttacctgccctatcttttctgccgcttcttccacagtctctatcgtttccccatgaatataggatttgccgtaattgctgattctattgtacgtgctctcatccgatataatcaggtctgttttcacggattccttcacaatatacagctcccgatcagataccagctcttttttcaacttctgaataatatccacaaccgctttcaataccggcctgacctgattcggatgaaccgccgcataaatatgaaaaagtccgcctttttcataggaaccgccataagaataaatggcatagcttaatcccatttcctcacggattgtctgaaaaagtcttgagttcacattaccgcccagcagactgttgacaacactgagtatgtatctctcaggatcatagtaatccagagattcaaaggctataatcatatgaacctgttccacatccttatgctgcatataaagggatggatagtattttgcctttgcaatctgcgcattggcttccaaaagcgaggctttataccccggcgcaatgcctccaaaacaattctccagtgcttcaaggactcttgcttcctcaaaatagccggatatagcgattgtcattcgatcagcagtataatattgcttcataaaatccagcacatcctgtctcttaaagccaagtactgtctgcttatcccctgaaatcagatacccaagcgaatgttctctccagattacttcctgcagccgttcatggacaatatcttccggggaatcatcatacatatcgatttcctcggcaataacccccagttcttttttcagatcattctcgtctattttggaattagataacatatccccaagaatatctatggcataaaaaagatgctcatacagcgtcttcgtgtaaaagcatgtatattctttcgtcgtataggcatccatattcccgccgatttctgtcatggcatctgccaattctctggctgttcgcttctccgttcctttaaacaacatatgttcaatcacatgcgcaatgccattggtctgtttattctcattgaccgagccggctttcacccatacccccatagatacagaacgatactgtggcatatattccattgcaaccttcagtccattacttaaataaaaggtcttaaccatttcttcactctttccagtataatttcatttatttaatataccgattatactatatcctgcctttgcacgtaaagaatttatttttcatttttatgcaatagaaaattcctcagaatttcctattgcatgaaaaaggccccggtgcctaagcaccggagcctgtatattcattgactctgaaaaattatctaacgatgaattattcagctgctttcttgatgtagccagcaagtctgtctttagcatctgcttctgtcttagcgtacagagcttctgctgtttctgggaagcctttcttcagggatgcataacgaacttcgttcatgatgaatgctctgaagtcgcccttaggttctttagtagaatcaaggatgaatggattcttgccctgagctttaagttctgggttgaatctccagcatgaccagtaaccgcactctacagcttctttaattcttgtctgagcacccttcataccgcccttgataccatggttgatacatggagcgtaagcgatgatgagtgatggaccatgataagcttcagcttctttaagagctttgatgaactggttcatgttagcgcccatagcaacctgtgctacgtatacataaccgtaagaagcagccatcataccaaggtctttcttctttgtcttcttacctgaagcagcaaatttagcaactgcacctacaggagtagacttagaagcctgaccaccagtattggagtaaacttctgtatctacaacgaatacgttaacgtcttcgttggaagcaagtacgtgatcaagaccgccgtaaccgatatcgtaagcccagccgtcaccaccgaagatccactgtgacttcttaactaagaggtcatagccttcaacgatagcatcacagattgctttagcttctgcattgtcgccagcgtaagccttagctgctgctaacagagctgcagatgtagccttagaagcttcgccttcttccttagtatctaaccaagcctgtgcttcttcagcaagaacgccaagatctacaagacctttgatcttcttagctaatgcttctctacgatgtttctgacccatgaacatacctaaaccgaattcagcattatcctcgaacagtgagttacaccatgcaggaccctgacctttttcgttagttgtatatggcatagatggagcagaaccaccccagatagatgtacaacctgttgcattagcaacatacattctatcaccgaataactgagttacaagtttgatgtaaggtgtttcaccacaacctgcacatgcgcctgagaactcaagtaatggtttttcaaactgtgaacccttaactgtgtatttgtccattgggttctctttctgtggaagagctactgcatattcccagttaggagcttcatcgagctgtgttccgagaggaaccatctcaagagcctttgtaggacagatgtttgcacagctgccacaacccagacagtcaagaggagatacctgcatcttgaactgatatttgcctgcaaggttagccttacctggaacagcaccgaagttagctggagctgcagctgcttcttcatctgttaacagaacaggtctgattgttgcatgagggcaaacatatgaacactggttacactggatacacttagcagcatcccatacaggtacgctgacagcaacaccacgtttttcgtatgcagctgttcccagagggaagtgaccatcttctctgccgttgaaagcagatactggtaaagcatcgccgtcgcaagcgttcattggcattacaacgtctcttacgaaatctggaacatccttaacaacaggagcgtcatcaggacatgtagcccagctttctggaacaggaacttctacgatcttatcaagaccagcatctacagctgcgaagttcttgttaacaacatcttcacccttcttaccataggacttaacgatcatttccttcatatacttaacagctgtatcgataggaatgatgttagccagtttgaagaatgcagcctgaagaacggcatttgtcttaccatttaacttaagttctttatcaacatcttctgcgttgatgatgtagaacttaacgtgtttctgagctaactgatgtttaaccttggatggcagtttttcatccagttcttctggagaccaaactgtattgaagaggaatgtaccaccttctttaatatcgccaaggatatcatacatatggatataagcctggttatgacatgcgataaagtcagctgtcttaacaaggtatgtagaacggataggtgtcttaccgaaacgaagatgtgactgtgtaacaccaccggacttcttggaatcatagtggaaatatgcctgagcatacatatctgtatggtcaccgatgatcttgatagagttcttgttagcacctacagtaccatcagaaccaagaccccagaacttacagcttgttgtaccagctggagcaacgtcaacttcagggatgattggtaaggaatgacctgtaacatcatcaacgataccgattgtgaagttgttctttggctgatctgctttcaggttctcatagatagagatgatggaacctggagtaacgtccttagaaccaaggccgtaacgaccgccaacgatatcatatgtcttgccttctttgaatgctgctgcacagacatcaacatataatggttcgccgtaacctgtaacttccttaactctatccataacagcaatcttcttaactgttgcaggaatagcttcgaacagtttgtctgctctgaaaggtctgtacagatgtactttaacgataccaactttttcgcctttagctgtcaggtaatcgataacttcttcagctgcttcacacatagaacccatagcgatgataacacgatcagcatctggagcaccatagtagttgaacagcttgtattcacgacctgtcatctcgctgactttagccatgtattcttctacgatttctggaagtgcatcgtagaacttgttgcttgcttcacgaccctggaagtaaacatctgggttctgagctgtacctctcataactggatgttctgggttcagagcggattttctgaactctgccagtgcatcgtaatctactaatttagctaattcatcataatctgtacattcaactttctgaatctcatgagatgttctgaagccatcaaagaaatgaaggaatggaactctgcctttgattgtagaaagatgagcaactgcagccagatccataacttcctgaacggagttagaacagagcattgcgaaacctgtctgacgacatgccataacgtcagagtgatcgccgaaaatgtttaatgcatgataagctaatgctctggcacttacatggaatacacaaggcaataattcacctgcgatcttatacatgttagggatcataagtaataagccctgggaagctgtataagtagttgttaatgcacctgaagaaatagaaccatgaactgtacctgaagcacctgcctcagattccatttctactacatcaacagtctgaccgaagatgttctttctgccgttggctgcccaatcgtcagttacttctgccataggtgaggatggtgtgatcgggaagataccagcaacttctgtgaacgcataagaagtccaagcagcagctgtgttaccatccatagttttcataacttttgccatgatatttttctcctttctatatatgaccatatcaataaacactttattgacaggtagtcattcttcaccatctattttaatacaagttgtataaatcgtcaagattataacctgcctatgttgtttattttttcacacaatcgcttaaaaatccgtacaatctatacttagccatatctcaccatcactgtatttcgaaccattgatcaccatgttgtcgatatccacgctgccatccccactgtccatctgtttaagaaaattgtcacactgccgctccagttctttttcgctccaatccgccttcgaatcgagtttctgagccaccattttgagaaatgattttatcctttctgtatcttccatagatgctgtcaccgaatgaattttaccggttgcactgtcactgtaaattatcacatagtcattatattccccgtcaacattataataagttgttttctgtagataagacgttgtctccccatcatatgtataaatatagttatcttccgatgacgaatcatctcctgatatatctcttccatattctgttctggtccaggcttcaatcaatgcccccatgtcttcatctgtcacatcaaaatgtccatagccattgcatccatccggatacgcagaaacttcctgttctgaaagttctctgtaatattcctctgacgatgtatcagaaccaataatttcgtctgcatcgtcaacccccaattcatccatcaaatcttcaatcacatattgaaaatcaccgtttgtaaaataatgaataaggcgacttccgacagcacctaacaatgcattcaaaataatgattgccaatacaaccttccccagacagcctccggccttgcgccgtttagcttccatgtccgtgcctgacctgtcggttctataagatctgccggcctttttctgtatactgctgccatagacttcctcatgggatgtagccttcttccgatttttctgcttcttgtcttctttcttcagcgcatccgaaaaccttccatagatgtcattcctgtgatccttctgatcatggctcacaccataagcacaatcttcctctcccattcctctctgctgcgcattgtaatgaacatccaggatctccggacgccatataaaagaatgacaagtatcgcagtaatgggctttcttcatctcactatcacataatgggcatatctttactttcatatcttattcctctcccccacttcctaacttggctgttgcattttttattgctttattgaccgcactgcctgtaaaagtcctgttcttgcatagtcatcaggcattcagcatgcatagcatactgttaattatatcttaccacaccctgcacccttaaaacaacaaaaggataccattctgtggatttttatctccgcaaaatgatatcctctatttattgatcatttatatgcttttataaacatctgtatctgctgattattctgcatctttcttactgaagctgatacgtcccatcttgtctttgcccatgcatttaactttgatgacatcaccaagtgtcagtacatcttctacgtgatttacgcgctttttgtcaagcttggagatatgaaccataccctctttgccaggtgcaaactcaaggaatgcaccgaattccttgatgctgacaaccttacctgtgtagatacggccttcttcgaaatcagatacgatcattgtgatcatatcgattgctttctgaatgccgactttgtctacgccgcagatagatacagcaccatcatctgttatatcgatcttcacacctgtttcgtcgatgatctggttgatgactttacccttctgacctacaacatcaccgatcttggaaggatcgatcttaatctgctggatcttcggagcaaattcgccgacttccttacgcggttcagagatgcaaggttcgataatctcagtaaggatgtactctcttgcctgctttgttcttctgatcgcttcttcaacaatcggacgtgtcagaccatgaatcttgatatccatctggattgctgtgatgccatcgtgtgtaccggctactttgaagtccatatcaccgaagaaatcttcaagcccctgaatatctgtcagtacaagataatcatcatctgtatcgccagttacaagaccacaggagatacctgcaacaggtttcttaatcggaacaccggcagccatcagagacatagtggatgcacagatggaagcctgtgatgtagaaccattggattcaaatgtctcagatactgtacgaatagcatatgggaactcttcttctgaaggaagaacaggcactaatgctctctcagccaatgcaccatgaccgatctcgcgacggcccggacctcttgaaggctttgtctcaccaactgagtatgatgggaaattataatgatgcatataacgtttgcttgtcacaaattcattcaggccatctaccttctgggcatctgataatggtgccagtgttgtgatagtacaaatctgtgtctgacctcttgtgaacattgcagaaccgtgtgttcttgcaaacaggtcgatctctgctgcaagcggacggatctgatcaatagcacggccatcaggacgcttgtgatccttgagaatcatcttacgtactgtcttcttctgatactgataaacagcatcgtcaatcagaggcagccactcttccttatctgcaaatgcttctgcgagcttgtctttaataacacggatgttggcatctcttgtctgcttctcatctgcaaatacagcttcttccattgcttctggcggaaagagttccttcatagctgcatttaattcttcaggaatagcataatgctcataatccttcttctctttgccgcattctgcaacaatctgatcgatgaatttgatgatctcctggttaacatcatgagctgcataaatagcctcgatcatcttgtcttcaggtacttcattggcacctgcctcaatcataattactttctcacgagtagaagcgactgtcagtgcaagatcggatacggatttctgctcattggatgggttaataataaactcaccattgatcatgccaacctgtgtcatggcacacgggccatcaaatggaatatcagaaatacatgttgcaatggcagaaccaagcattgctgtcagctcagggctgcatgtctgatctacacacaaaacaagattgttcagtgtcacatcatttctataatccttagggaagagcggacgcatcggtctgtcgataactctcgctgtaaggaccgcattctcgcttgccttaccttcacgcttgttgaaaccgcccggaatcttgcctaccgagtacatcttctcttcaaattcaacacttaacgggaagaaatcaataccatctctcggtttctctgaagctgttgctgttgataacacacatgtgtcaccataatacataagggcagcgccatttgcctgagcagcaacatgtcctacttctacacgaagtgttctgccggcaagttccatggaaaaacttttgtattcttttgccattttcaatctccttttataaattataaatttctcaggagccttccgaaactactgaataatcaaccaatgcctcgctctgattaacttttcagtggtctcggacagtaacaattctggaatttccagatgctcctgatagttcgtgcaacgcaaacagggctgccgcataatacctttaccgacagccccatgatagataataattatcttcttaaacctaacttctcaacgatagctctgtatctctcgatatctgtcttcttcaggtaatcaagtaagccacgtctctgaccaaccatcttaagcataccacgtcttgaatgatggtctttcttgtgtgtcttcagatgctctgtaaggtcagcgattcttgctgataaaagtgcgatctgaacttctggtgaacctgtatcttcaggtgtcttaccgtatttagctacgatttcttttttctgttctgctgtaatcattaataaatcctcctaaatcttaataaatgccttatgccaagatccggttggagattccttgatctgggcacaggttaaaactcatacttaatcattgtagcatagtattatcaagttgtaaacaactttttgtattgaatttgtactgtttttcttgcaatccccctgaaaacacgataagatataaaccagtgaaaactttgtctgcaaagcagacccgaatgacacgccgggactcgcaattgagtcctgaatagtataataaaggaaaggatgaattaaccgatgaaactctggggcggacgctttaccaaagaagaaaaccagcttgtacataactttaatgcttcgatcactttcgatcagaagttctatcatcaggatattcagggcagtatcgcccatgtcacaatgcttgccaaacaggcaatcatcacagatgctgaacgtgataccattatctcagcactgaaagaaatctgcagcgatatcgaatccggcaaattacagattacagaggaatatgaagatatccacagcttcgtggaatctgtcctgatcgaacgcaccggtgataccggcaagaagctccatacagggcgcagccgtaatgaccaggtagcccttgatatgaaactctacacccgcgatgaagttctggcaacagacgaactggtcaaggaactgatgaccacactgcttgatctgatgaaagaacacatcgatacttatatgccgggctttacacatctgcagaaagcacagcctgttacactggctcaccacatcggtgcttacttcgaaatgttcaagcgtgaccgttcaagactccatgacattcatgagcgtatgaactactgcccgttgggtgcaggtgcgctggcaggcacaacttatcccctggatcgtgaatatacagccagccttctcggtttcacaggcccaaccctcaacagtatggattctgtatctgacagagactacctcatcgaatacctcagtgccctgtccacgatcatgatgcatctgagccgtttctgtgaagagatcatcctctggaacagcaatgaataccgcttcatcgaactggatgatgcctattctaccggcagttccatcatgcctcagaagaagaatcctgatattgcagaactgatccgaggcaaaacaggccgtgtctatggtgcattgacatctctgctcacaaccatgaaaggccttcctcttgcttataacaaagatatgcaggaagacaaagaactgaccttcgatgctattgatacagtcaaaggctgcctggctctgttcaagggcatgatcaaaaccatgcatgtcaacaaagaaaccatggctgccagcagcaaaaatggtttcaccaacgctactgatgctgccgattatcttgtaaaacatggtgtaccattccgtgatgcccacggcatcatcggacagcttgttctgatctgtatcgacaaaggtatcgccctggatgacctgcctctggaagaatacaagaaaatcagtcctgtcttcgaagaagacgtctatgaagccatcagcatgaagacctgtgtcagcctgcgtcagaccatcggtgctccgggccatgaagccatgcagaaagtcattgatatcaacagccgttatctggaagaaaactaatctgccgtttattcaataacgctgcgcatcctgtgggatgcagcctttcaaagccgtgtatttcaacttccaactacagtttcgaatacacggcttattctgttccttccgtaatacttcatccaatctgattcaatccatctataaaaagttctacagcccgctgctgcttctccgtcagcaaattccatctgtccaaatgacgcttcggctctgcattcaggtgaatcagatcatcctgcccataaaggaattcagccaatgtgattccgtaagcttcacatacattctcaatggttgtcaatgatggacaagtccctcgatgcatcatattcgtcaatgtcgaaggagaaagattcgcctcttttgccaggcgatacactgtccatccccgcttctcattctccttcctgatacgccctacaatatcaagattcatcttgtctgcctcctccctatcattttgtttacacatcatatcacaatttacgacaaatggacgatttttcgacaaacaacttttaatttatttttttaacgaatatggtataatagatgcagtttcaatcagaggaagaaaacgcccatctattatcattttttcaaaaaaggaggcttcttatgcatattttagtctcaacaactacagccagtgatctggccgagacagctgaacagtccattgattatctccagaagattgtcgactatatgatcagtaaagcgcacattctgatcagtgcactgatcatcctgatcgttggctggtatctgaccaagtttatctgcaaactggtgcgccattctctggacaaaacacgactggatgccagtgtcacaagttttatcaattcactgaccaaattcggattacgcgcattgctcgccatcattgtgatcaataagttaggagtcgataccacttctctgatcgcgctgctgacttctgccagtttagccatcggtctcgctgttcagggaagccttgcaaattttgcaggcggtgtgcttttgctgatcatgaaaccatttgtggtgggagactatatagacgatggaagcggccacgaaggaactgtcatgtccattgagattatctacacccgactgctgacggccaacaatgagatggtctgtatccccaatggcaaactggctgattctccggtgaccaacctgacacatcaggaaaaccgccgccttgattttcctgtcagcatcagttacgacgagaatattgaccgggttcgtaccgttcttttaaaagtagctgccgaatgcccaacgctttccaagttcaaagaaccctttgtgtttgtggacgactttgacagcagctccgtccgcgttgtcttaagagtctgggcgctcaccgacaaatactgggatacccgctttgaaatccgagaggccatcaaaaaagcctttgacgcggaaggcatagaaattccatatgaccatatggacgtaaaccttgttaattccgagaaataggatagtgcggcccataagctttaaataaaaagattttcaacgaattggttcatcacaggcacgctcccgctgcctgccactgacagcggtacataaggcagtacaaaacactgcctaagtaccggtcgtgtcagaagcacctgtgattaaacaaattcattgaaaatcctttctcgaagtttattgaggccgcacttttttatttttttggaattaactaccaaacatatataactctacaaatatcagcatatatccatattctctgcatattctgcattctcatggaccgacataagcgcgctcaataattattaaacagggctttcgaagaaaacaattcaagtacaagcgcttcgatggctgccggtacttagacattgttttttaatgtcttatgtaccgctgctgccatcggcagtgcaaacgtgcttgtattgaattttttcttcgaaagccctttctaaatacttgaagcgcgctctctgctatttttcgatttgatgaatgaacaggccagaccgaagttttggttcgaaccatgtggattttggcggcatgagccgtcctgcgtcagccacggccaacagttcccggatagatgtcggatacattgaaaaagccaccaccatgtcttcatgacaccgtttttcaagttctcccagtccgcggatacctccgacgaattcaatgttctcatctgttctcggatcttcaataccaagtacaggatccagcagattcatctgaagaatagacacatccagcccgtccaccgggtcttcggatgttttatccggatggacattcagtcgataccaatcatgatccagatacatgccgaattcaccttttttcgatggtgaaaccgcctcttttcccacgtgttccactgtaaaatcccgtcggatcctctccagaaaatcttcttttgaccagccattcagatttttcaccaaacgattataatccatgatcttcaattcttcctcaggaaataaaaccgcaaggaagtaattgaattcttctgttccattataagccggatgggttcttcgccgcttcatgcccactttaaaggcactggctgcgcgatgatgaccatcagcaatatacaacgcatcaacagccgcaaaggccttttcaatggcagctaccgcaaggtcatcaccaacaatccacactctgtgtcgtatgccatcttccgcctcaaaatcatacacaggtgattcttccttcacatgacagacgatataagaaaggatcggattggttctgtatgtcagaaaaatcggtccggtctgcgcactgcagacatcaacatgccgaatacggtcttgttctttctccgctctcgtatcttcatgttttttgactacctgatgcagataatcatcaatagatacacaagcagtaatgcccgtctgtgttcggccgttcatggtcagttcgtacagataataacatttttgttcatcctgaacaaaaatgccctcggcaatctccctatccagcatttcttttgctttttcataaacacagtccgcatacatatccatagatgggtcaaactgtgtctccgggcggtcaatattgagaaaagacaaaggatgccctttcactttctccgctgcttcttctctgttatagacatcataaggcaaagccgccacctgcgcagccagcgcagatgacggcctgattgccttaaaaggcttgacatttgccataaagcttatttcacctttcgtacttttacaactccgttaatagctgccagtttttcaacaagagcttctgaaacttctgaaccgatatccatcattgtgtatgcccagtcaccttttgacttgttggtcatatcttcaatattgataccctcagccgcacaggcacctgtcagctgtcccagcatgttcggaatattcttatggcagattgtaatacggccggcagccttgcagatacccatatcacaggcaggatagttgacagaatgtgtgatattaccattctcaagataatccctcaattctttcactgccatcactgcgcagttatcttctgattcttctgtagaagcacccagatgagggatggccacaacgccattcatctgagctgtctttgcattcgggaaatctgtgatatactttctgaccttacccgctgcaatggctgcttcaagggcatcatcatctactaacaggtcacgtgcaaagttcagcacaatgacgccatctttcatcttcgcaaatgcatccgcattgatcattttctttgtgctgtccattaatggtacatgtacagtaatatagtcacagtttgtatagatatcctctacattggcgatatgtttgatatcctttgacagattccatgcagcgtcaacagaaatgaacgggtcataaccataaactttcataccaagtgccacacaggcattggctaccagaacaccaatggcacccagaccgatcacgccgatcttctttcccataatctctgtgccggcaaactgtttcttgcctttttctacaagtttggccacattcggatcttcttttactgtctgaacccagtttacgccgccgacaatgtctcttgcgccaaggaaaagacctgcaagaacagcttcctttacaccattggcattcgcacccggtgtattaaagacaacaatacctttttctgcacatttgtccaatggaatattattgacaccggcacctgctctggcaatcgccaacagctgatccggcagttccagttcatggacacttgcacttcttacaagtgccgcatcagatgcagcaaaatcatcaaccttctcataggcatctgtaaaaagctgcatgcctacagcagcaattggatttaagcaactaattttcatgatcattacctccggggaactcggcttattttgtattctctgcctcaaacttcttcataaaatcaacaagggcaacaacaccttctgtcggcattgcattgtaaatgctggctctcataccgccgacggtacgatgacctttcagattctcaaaaccagctgcctttgcttctgcaacaaacttagcatccagatctttatcgcctgttacaaaaggtacgttcataatagaacgactttctttctcaacagtacctttgaacatcttgctctgatcaagaaaatcataaaggatcttcgcttttgcttcgttgatcttctttctttcttcaagaccgcctgtcttcaacagccatttgaagactttgccgcagatataaatgccgtagcaaggcggtgtattatacagagaatcattgtctgcctgtgtcttatacttcagcatagttggtgtgcccggaagaacatcatctgtgatcagatcttctctgatgatggcaataacagtaccagcagggcctacgtttttctgtacaccagcataaatcataccgtatttcgtcacatcaacaggttctgataagaaacatgaagactgatcagcaatcagtaatttacctttggtattcggcaaagtatggtattttgtaccataaattgtgttgttttcgcaaatatacacataatccatatcatccgtaatcggcaggtcactgcagtccggaatatatgtaaatgttttgtctgctgatgaggctaattcgacagcttcgccgaaaatcttagcttctgaaaacgctttcttagcccactgaccagtcaggatatatcccgcttttctatttttcatgaagttcataggaatcatggcaaactgctgtgaagcaccaccctgaaggaacaacaccttatagttgtctggaatattcatgagctttcttaaatcagcttctgcttctttaataatattgtcgaaagctttagatcgatggctcatctccattactgacatgccagtgcctctgtagtcaagcatttcatctgctgcttcctgcaatacttcaacaggcaacacagctggtcctgctgaaaagttataaactctgctcatttttcttctctcctttttagatgaattgttatatatttaaaccaaaaggtggtttacggatattaattgtcgaggtcttcctcggaaaatgcatctgcaatggatgctccgggagcaaccatcggccataccttatcatccggatcaatcatacaatcgatgagaaccggcttctttaaattgatcgcccactgaatggtttcatcaaattctttctgtgttgtcacgcgtcggccgtccacgcccatggcttcggcaacttttacataatcaacactatcacttaaaacagtggctgaatagcgttcgccataaaacaatgtctgccactgtctgaccataccaagtacatggttgtcgacaaccacttcaataaccggaatctgatatctggaagctgttgccagctcattcatgttcattcggaaacaaccgtctccggcaacattgatcacgattctgtccggacagccaagcttggcaccaagtgctgccccaaggccatagcccatggttccgagaccgccggaagaaataaactgtcttggttccttatatttataaaattgtgcagcccacatctggttctgcccaacttctgtgcaaatgatcgcatcaccgtctgttgccttataaatactctcgacaacccccggtccggtcagtacctcatgattgtaagtcatcggataacgagacttcatctcacgaatatgccgcatccacggctcatgatcctgctgcgtcagtttctcattcaatctctgaagaacaactttggcatcgccttcaattgaatacttgcacataacattcttattgacttctgcagcatccacatcaatatggacaagatccgcatgtctggcaaatgccttgacattgcccaggacacgatccgaaaaacgtgtaccgatggcaagcagaagatcggattccgtgataccgtaattggatgtcttggtaccatgcatgcctaccatacctgtataggtatcttccctgccgtcaaaagcacctttacccatcagcgtatctgccacaggtgcctgtactttgcttacaaactctctgagctcatctgccgcatctgcacggatgacaccgccgcccacaagaataaatggtctgacagaatgttcgatcagtccgataacttcctgcatcgtctcttcattgatctgatcagacttgcgtttgatcggtgccggcaccttatattcatactcagcttctgcaccggtgacatcctttggaatatccacaagaaccggtcccggacgccctgtctgagcaatcgcaaatgcacggcggatggtatccgccagcttattcacatctttgacaataaaattatgttttgtcaccggcattgtaataccagcgatatcgatttcctgaaaactatctttgccaagaagattgacattgacattacaggtgattgccaccactggaactgagtccatataagccgttgcaatgcctgtaacgatattggttgctcccggtcctgatgttgccagacagacaccgactttgccggttgtacgggcatagccgtctgccgcatgggaagcgccctgttcatgtgaagttaatacatgtctgatctcatcgctgtgcttgtaaagtgcatcatacacattgaggattgcaccgccgggataaccaaaaactgtatccacaccttgctctttcagacactcaactacaatttctgctcctgttaataacattctattcttcccttccgaatctatactgtcggagcctgaaggatcgcacccttgctgctatctgtaacaagtgcagcgtaacgtgccagataacctgttgtaaccttcggctctcttggctgccattttgctcttctctcggcaagcacttcatcagaaacatcgacatttaatgtattttcaggaatattgatcttgataatatccccctcttcaacaagcgcgatattgccgcccaatgctgcttcaggagatacatgtccgatagaagcccctctggatgcgccagagaaacgtccgtccgtgatcagtgccacactggagcccagacccatacctgcgatggcagatgtcggattcagcatttctctcataccaggaccgccctttggtccttcatagcggataaccacaacatctccaggtacaatcttgccgcccttgattgctgcaatggcatcctcttcgcaatcaaagacacgtgcaggtccttcgtgtaccatcatctcaggaacaactgcagaacgtttaacaacactgccgttcactgccaggttgcccttcagtaccgcaataccgcctgtctgactgtatggattgtcgattgggcggattacctcaggattcttattctcgcatcctttaatattctcaccaaccgtcttgcctgttgcagtgatcaggtctgtgtaaagcagtccctttttattcagctcattcataacagcataaatgccgcctgcttcattgagctcttccatatatgtatgtccggccggtgccagatgacacaggttcggtgtctttgcactcaattcattggcaatatcaaggttgatctcaacccctgcttcatgtgcaattgccggaagatgaagcattgtatttgtcgaacatcccagggccatatccacagtcaatgcattcataaatgccttctctgtcaggatatctcttggacgaatattcttctccagaagttccataactttcataccggcatgttttgccagtttgatacgttcagaataaacagccggaattgtgccgttgccctgaagccccataccaatggcttctgtcagacaattcatactgttggctgtatacataccggaacaggaaccgcaggtcggacaagcatgctgttcatagtcaagcacatcttcctcagacatcttgcctgctgcgtaggaaccgactgcttcaaacatactggaaaggctcgtcttctgtccttttacatgaccggctaacatcggaccgccgctgacaaatacagtcggcacattcactctggctgctgccatcagaagtcccggaacattcttatcacagttcggcaccataaccaatgcatcaaactgatgggcaatagccattgcctctgtggaatctgcgatcagatcacgtgttacaagggaatacttcataccgatatgccccatagcaataccgtcacagacagcaattgccgggaaaacgaccggtgtaccgcctgccatggcaacaccaagtttaactgcattgacaatcttgtccaggttcatatggcccggtacgatctcattgtaggaacttacgatacctacaagtggtttcttcatttcttcctgagtcattcccagtgcattaaaaagggaacgatgcggtgcttgctgcataccgcttttaacattatcactcttcattctattaattccttcctaaaaaccctaatagcatctattactgaatctcagctgcaatggcatcacccatctctttgcagccaagctgtgtgcatccttctgacataatgtcaaccgttctgaagcctttcttcaaaacagccttaaccgctgcctcaatggcatctgcttctttatccaaattcaatgaatatctgagcatcatagctgctgaaagaatggttgcgatcggattcgcctgattcgttcctgcgatgtccggtgcggaaccatggcttggttcatacaggccgaggcttgtctcactgagacttgctgatgataacataccaatggaacctgtaatctcactggcctcatcagaaaggatatcaccaaacatattctctgtcaggataacatcaaactgtcccggattcttcacaagctgcattgcacagttatcaaccagcatatgagaataggttacttccggataatccttcgctacttcttcaacaacctttctccataagcgtgaggaatcaagtacatttgccttatcaacactgatcacattcttacgtctcttcatagcgatctcaaaacctttaatggcaattcttctgatctcgttctcatcataggtcagtgaatcataggctttcaaaacaccgttctcctcaactgtctttctctctccaaagtaaagaccgcctgtcagttctcgcatgataaccatatcaaatccctgatctccgataatctcatccttgatcgggcaggctgcctttaattcatcatacagatatgccggacggatattggcaaataagccaagtgacttacgaagcttcagcagaccggcctctggacgaagggatggttccagtttgtaccatggtgatgtagtcgtattgccgccgatggaacccatcaatacagaatcactggctttacactgtgcaatggcctcatctgtcaatggcacaccgcaggcatcaatggattctccgcccatcagtactcttgtataatcaaatgtatgaccatacttcacaccgacccgatccagcacttttacagcctcatctacaatttcaggaccaataccgtcaccttttattaatgcaatcttataattcatgataatctccctttccccgacaaacggccttgcatttgcgttaaaatctataataaactattttttttagaatttcaactgtatttgcgtaaaaatttaacttgctaacgtataaaatcaaataatgcctgttaaaatggcattcttggtttgtttttctattgaaattccagtgttgttattgtaccacacttagatgtataatagaaatatatattacgtataagcgttataagtcacagttataggagaagatttatggatacaacactttctttatatcgcattttttacactgtcgctcaatgtggctcgatctctgccgcagcgaggcacctttatatcagccagcctgctatcagcaagtccatcagcaatcttgaaaacgaacttcagacccacctcttcgaacgtacctcccgcggtgtttctctgacagaagaagggcagttgctttttcatcatgtatcggacgctttccattctctggaagcaggggaagcggaactctcccgcattcgcgatatgggtcttggacaccttaccatcggcgtcagcacaacactctgcaggtaccgtctgctgccttatctgaaaacatttattgcgcaatatccgcatatcagtatcaatatttcctgccagtccaccaatcatacactggatatgctcagagacggctctattgatctcggcctggtggccaaaccggaagacaccggacatatttcctttgtttcacagggaagaatcgaggatgttttcgtctgtacacccaactatctcaacaatcttcagatgcgtacacaagcctccggcttggatctgctcaatgccggcacactgatgcttcttgacaaagccaatgcatcccggcagtttattgattatttccttgaggaaaatcacattcatgcctccaatctgattgagattacaacaatggatcttctgattgaattcgccagaaccgggcttggcattgcctgtgtcatcaaggattttgtcgctgacgacttgaaaagcggccttctcgtcgaaatacccaccccacaggccattcacccaagagagattgtctttgcctggaaaaaaggccgatcatcccaccgttttctcaacgctttcattgattttgtctcttagtatctgaaaaacagcattgcgaaattctctttcacaatgctgtttttttacggctcatttaaaattaaacatccgttttttattgtctttcactattatttttcaggataaaagcctgacggtgcttcagaaagattgatcataatattcttcatctgtgtataatgttcaagaatcactttatgtgtctctcttccaatgccagactgcttgtagccaccaaacggtgcacctgccggaatcgcattgtaagtattgacccacattctacctgtttcaatcgctcttgatacacggatcgcacgattgatatctcttgtccatacggcaccaccaagaccgtatttgctgtcattggccatctcaatcacttcgtcctctgtcttgaacttgatcacacatgcaaccggtccgaaaatctcttcctgagccacgcgcatatcatttgtaacattcgtgatcagtgtcggtttcataaatgcaccttttgcaagttcaccttccgtacatctctcaccgccacaagcaatagttgcaccttctgattttgcgatatctatataggaaagaatcttcttaagctgcccttcattaatctgtgaacccatctgtgtatcctgttcccacggaagaccgactttcacatgattaaatgctttcacagcagcttctacaaacttgtcataaataccttcttggacaaatactcttgaaccagcgcagcagacctgaccctgattgaacaaaataccaagctgcagaccatctaatgccatatcccacttacagtcatcaaagaaaatatttgctgatttaccgccaagttccagtgtggacggaatcagtttctctgccgctgccagtgcgacatctctgccgacctctgtagaacctgtaaatgccagttttctgaaacctttatgttttaacattgaattgccaacgccagaaccggaacctgtgattacattaaagacacctgccggaagaacatcctgaatcagtctcgcaaactcaagcacactcaaagatgttgtgctagaaggtttaaagacggtacagcatccgcttgcaagaactggtgccaacttccatgcagccatcaaaaatgggaaattccaaggtacaatctgaccaacaacaccaatcggctctctgagaatcagactcattgtattgccatccagcatagaagccgttccttcttcagccagaacagcacctgcaaaatatctgaaatgttcagccgaataaggaatatcaattgccattgtctcacgaatcggtttaccattatctaatgtctctaccattgcaagatgctctgcattctcatcgataatgtccgcaattctattcagaatcttcgctctctctgcaggtgttgtctgtttccatgaatcccatgctttccatgcactatctacagcaagatcaagatctgcatctgtcgcctgtgcacactctgccagtagttcgccattggccggattgtaactcttaaatgtctttccgtcagaagccggctgccactgaccattaataaataaaccgtatttttcctgtaaacaagtcttcatatgttgtccccccttcattgtgtaaaaaatgacttgatgctcaagccttcagttcctttgatgtcttcatcttagcaccaaattgtttgatagtcaacaataatttattgtttaacgctcttattgtcagacttcgatgtttatttaacattattttcagtttatattttaattattttagcatttattcacaaatatttatttgatttgtgagcagactagccaaatttaattgtatttatttaaatacaatttgtcttttaacaaacggtatcctttccgtttggaaagtgttttttccgaatgaaacgtttccatcgttaatttcttttcaaaaaaatgtgtttaaacgtatcgcttgtcacaaaaaaaagaggccatccctctttcgagtgatgacctctcttatcgttattctcttgaaaaacagaagaattagttgttgatcagtttgtcttcgccattccagctgtaaagttttctgatttcttcaccaactttttctgatggatgttctgcagctttctttctcattgctttgaagtgtacctgcttgcctgcatcagacatatccagtaagaagtcttttgcaaatgtaccatcctggatatcggacagaatctgtttcattgctttctttgtatcttctgtaacaatcttaggacctgtgatgtaatcaccgtactctgctgtgttggagatagagtatctcatgccggcaaagcctgactgatagatcaggtctacgatcagtttcatttcatggatacattcgaagtatgcatttcttgggtcgtagccagcttcaaccagtgtttcgaaaccagcctgcatcagtgcacaaacaccaccgcaaaggactgcctgttcgccgaaaaggtcagtttctgtttcgattctgaatgttgtttccagaacacctgctcttgcaccaccgataccaagtgcataagctaaagccagttcctgagctttgcctgttgcatcctgttctacagcgatcagacaaggtgtacctttacctgctacatactcacttcttactgtatgaccaggtgccttaggtgcaatcattgtaacatcgacatccttaggaggtacgattgttccgaaatggatattgaaaccatgagcaaacatcagcatgttgcctgcttccaggtttggttcgatctcatctttgtaaagtgcagcctgtttctcatcattgatcagaatcatgatgatatcagccttcttagctgcttctgcagatgtataaacttcaaaaccttctgattcagctttagcccaggacttgctgcctttgtaaagaccaatgatgacatggcatcctgaatcctttaaattctttgcatgggcatgtccctggctgccgtaaccgataatggcgattgttttgccctctaataatgagagattacagtcctgttcataaaaaatcttagccattgttatgaaacctcctgatagtataaaaataaatgtattaataatggataataaatacctattattctgttatcaatcctgcctcctaaaggctttttcctttcaaaggcacaacacactctgaaccacgctccagacctgtcagacctgtactggcaacttcaagtatctcatagccgtccagcagattaataaatgcatccagtttctcctgcttgcctgtcagctcgataatcatagaatctcttgtcacgtccaccactttaccatggaaaatgctgctgactgccattatggactgacgattctccgaaagtacccggactttcacaagcatcagttcacgacaaactgaatccaccgctgtcagatctgtcacataaatgacatcttccaactttctgacctgcttctcaatctgttccagtacctgctcatcaccatgaacaactactgtaatcctggaaaaccttggatccagtgtatcacatcctgtaaaactgtccaggttgaagcctcgtctgctgaacataccggaaacacgactggtaacaccatagttattctctaccagcattgttaatatcttcttgcgttctttcatgttcaattacatcctttccccaaagcgacctgcatgcattcccggcaaacctgtctttttcggtatgactgtcaacgcttattttagcaatatgtcctctgtttgtcaatagatttcactgaattgcagtaatattttatctgtttaaagttagaaaattttgttttactgccaaaggctttttctcaatgccaacatcctgtatacattccgtatattctcttcagccattgtcgtaaactttaaaatatgatacactcctatcaaaatataatttaggaggcgtgtatcatgattaaaaatattggttttatcggtgccggtgtcatgggcaagtccatgatacgcaatctgatgaaaaaagggtttcaggtaacagtttattcaagaacaaagtcaaaagctgaagacattatcgcagaaggtgccatctggcgtgattctgccgctgagtgtgctaaaggtcaggacgtcatcatcaccattgtcggttttccaaaggatgtggaagaaacttattttggcgaaaagggtatcattgccaattccgaagacaatgccattctcattgacatgaccacttccagcccgaaactggctgctaagatttatgatgaggccaaagcagtcggcaaacacgcattagatgcacctgtctccggcggtgactccggtgccaaagcaggcacattaagtattatggtaggcggcgacaaagaaattttcgaaaaagccatgcctgtttttgaagctatgggcaccaatattatttatgaaggtactgccggatgcggacagcacacgaaaatggccaaccagattgccctgacaggctgtattgccggtgtctgcgaagctatcacctatgccaggaaaacaggtcttgatattcagacaatgcttgacagtatcagtgccggcgctgcaggcagctggcagatgagcaatatggctccgcgtatgctcaaaggtgactttgaccctggattcttcatcaagcattacatcaaggacatgaatattgccacagaagaaggccgtgaagccggtgctgacctttctatttcagaagctgttctggctatttacaaagatcttgaagccaaaggcctcggcgatctgggcacacaggctttgctgaaacattatctagatgtatagagaattatccggatgccgaatcactgccccatctttttgatgatgtactgaactaattgaatttgtaactgttcagagccaagcaaaatttcaaaaaacaagttaaaatgcttgcatttttaagactgtttttgaaattttatttggcggatacgccacaccgacgaaatgcgcagcattttggaggttagctctgaacagttacttgaatttaataaaatagcaaaagcacgtatatttcataatctccttcaatgaatgaaatcatctgaaacaatacgtgcttttgttatatgcaagacttctcggcaactcctgatacaaaactcaattctgaccaaatgaattgttgcctatttgaatttctacattctattataactctcttttcatataaaactgctccgaaagtttcatagaccccagaaataacactgcagcaataacagccaacacaaccatataaatcggattttccgcaaataccgcaaatgctccggataattgtgaaacctctgagaaatcatatccgccaaaattgacaaatgctacacaaaatacgacaacaacagcaatatacatcaccctgcctttttctgaaccgtatttaaaaatcatcggcagacaaatcgcagaaaatgcatgtcctacactccatataaggcaaaaaatattcaatacccatactggattaaaaatacctcttaccgcacccaccagactatgtgcagctgctaacacaaccgacagcccagcaataagtaaaaatgacagcagatactttgaatccactacctgttttctcgtataaggcattgtctcacaatattgctgccacctgcttttttcatcataggccaataaagatactgaattgataccgcataacaccgcaggataggccagcataaacaaattacctccatcagccagagagcacacgccaaatatcaatacaatcaaagcatatggccgacaatatttcaaaagcatataataatccttcaacaataatcccttcattatgctctcccccttaccatcatcacaaataattcttcaatatcaatcgggctgacttcccagcctgctggcagctccgctcttcttacaacagcttcaactccatatggtgactcactttttccaatcacagcctgcggattcagttccttaagctgctcggcactgcatcgaatcaaaccatacaactctgtcagcctatctttttcctcgcacagcaccaactgaccctgatgcataaatgcaatatagtcacagatcttctcaagatcactgacaatatgagacgaaacaagcactgcatgattttcatctcttgtaaaatcattcagaagatcaagtacatcatctctcacaaccggatccaacccacttgtggcttcatccagaataagcagtttcggatgatgagacatagcaactgcaatgccgatcttcatcttcatacccttggaatactcaccaaatttcttctgatccggaactcccagtttcacacaaagcgcttcaaaatagtctgaatcccagtttttaaaagtgagggccataatattgccaacctgcctcctgttcagacactccggcaagccgacttcatccaacacaacgccgatatcttccttcaatgactgcatctctgtcacattgtctcttcctaatatagaaatacttccacaatcccggtggatcatattcagaatcagcttgatagtcgtactctttcctgcgccattctcaccaactaagcccataatgcagccgccgggcaatgtcagattcagatgctccagattgaaatccttatagcttttacttaaatccctgatctctattgcattcatttactcatcctcctccaggatacgaaacatctcaatgatatcctccagactcaatccacatggcatcgccagctttcgtatctcctgtatatagccttcaatcttcttcaagttctcctcacgcagtaattccacattcttcggtgccacaaaactgcctttgcctgcaactgtatagataaatccttccttctccaattcctcataggcacgcttcgttgtaatcacactgattctcagatccttcgccagactcctgatagaaggaagagactcatcttcctgcatgtcaccgccgataatctgcgccttgatctgtgaataaatctgatcataaatcggggcaccgcttttattatctataaaaatattcacgcccttgcctccttgcctactgtatatatacagtatatacagtaagttcagttttgtcaagacacacctcacgactttcttattttatttttaattcataattttcctggattttataaacttttcatttaatcgacaacgactttttacagaatctgcttccatgccgatttataatagttgaacacccgcaaaaaatagattataataaaaggaggatacacaatgactacattctttcagggaggtactgctatgcagatgcttacaggaaatgactttattgatgaaggtcctttcactattgatgatatttttgcacttccggagggacaacgtgcagaactcatcgatggacagatttatgatatggccacgccaaaccgtatgcatcagacaatcagcttttccatcgctagaactattgccgatcatatagatgccaaaaacggcggatgtgaagtgtatatggctccatttgccgtcattatacaaaacgatatcaaaaattatgtggaaccggacatctgtgtcatctgtgacaaggataaactcagtgacagaggctgtgagggtgctcctgattggatcattgaaatcgtttcaccttcaagccgtaaaacagattacatcattaagaacaccgcctactcccgcgccggagtccgtgaatattggatcgtagatccggccaaagcatgcacaaccgtctatgactatgacaaagatgccgccccgacaattatcccatttgaccagtctgtgcaatgcggtattttcccggatttatccataacagtatctgactatctcaaataaaaaatgaaacctctgctttttcattacctacacatatccaccctctcgaaaaacataaaaagccccggtctttatagtgcttacagtaacaaaactctctgaaaacgcttggcgctgagcctgttttcagagagttttttatgcaagtaccataaaaaccggaactctttatatctcaatctttattcattttaacgctgcatttcctgctttgccagctgtcttcccatatagaggcccacaccaatctgcatcaacgacgttgcagcagtcaggaagaaaacatattctgcaccgaacttctcccagatgacccccagtacagctgaaacagtgatagccagaatatggtcaagactcagtcccactgacagactggctgtgacttccgacggatcaatagccaattttctcatcatgaaggcatgtaccatattaaactgctccagcagaaaggccagtatgtacaggcaataaacaagaaaaacccagataccgtgactgccgagaccgcctctttcaagagcacccgccgctgcgccaagggctgcaatcacaacaagcagatatcctccctcgaagatcatcgtatacttcagacccttttcatccagcatttttccgagatatttgctgaaaaatgcaccgataaaagaggtcacaattccaagcagtgccacagtatctgcaccttttcccatcaattcgatgataatccacggtccgaacacaagcttgattcgcttctgacagccataggcaaccagcgtcagataatacggcatgtacttctttctcatgacaaacttgctctttgtctttgcctgaatctgcgtccttggcataattttcttcatgtaaaacaacagtccggctgcaatcagcgacaaaattgctgcaatgacaaaaggtttcaaaatcttatcctcaaaactgaagaatccccaacgatagcctgcaaaaataacaaaagccgtcaccatcgtacacatatttgctttgcttttgaaatttcccagcgtcttgccgacttcaccttctctggccagatccatactgatggcatcgttgagaggcataaacagatgcatacccaaagactggataaacagaaaaatcatcatcatgccgtaggacggactaaatgcccccatcaccatcagaccaaccatcaccaacacctgggaaacagccgcaatgccgatatcgctgaatcctgccagtgctgaaataatcaatgcacacaaaacccccggcgattctctcggtatttccaggaaccctctctgggcactgtccacatggtagacctctttaaaatagttggaaaatgtcgccgagccaaggcctccggcaatagccgacaaacatacaaccagcgtaaaaacaaaaacggctctctgaagctgtctttttttattattctcttccattatccattatctcctcagtctattcttaatccagtaactttctgaccattggcccatcaaaagttacactctgcttatgatccacttcaatctgatacagggcgttggccgcaatatgttctgctgcctgctccagatcgcggatacctgttgtatctgcataacgcgccacaatagtatccaatgcctcatctgtcacaatacattcctccggtttcagctgcatcctgccaagtaccttcggcaatgcaaattttgagaaaataatcttcttctcttccggcgtataatcaggaatgtcaatcactgcaaaacgtgacatcagcggtgcactgatctggctcttgtcattggctgttgcaatcggataaacccccaccgtcggcaccatacattctatgtaattatctgtaaatccaagattatccaaaagggtcagcaatacatcagatggattgccgttgcccttgccggaagcagctttgtccaactcattgataataaagacaagattggatgctcccgccatagaaaaagcttccaaaataatgcccggtttggcattggcataaatacgggagcttccggtcaactgctcagggtcattgatggaactcatgtccagagttgtccaaggcagtttcaggattcttgccaccgcataggcgatctgagacttaccggtacctgcaggtcccacaagcaaaagaccgtaggccggcaatgtatgggttctgttgatctgaataatggtctcgataatacgctgtttcacccgctccatgccataaagttcctcatctaggatccttcgggcctcctttggatcaatggcctcgaaataattattcttccactgaatgttcatcataatggacagggcacgctgggcatgtctgcgctcttccggtgacacctcatgagaccttgcaaccgccagatttcttctggcccaaagtctgatattgtccggaagcgttcttcccgcacaattcataaaatccgtaatactctgcaggctggtgagcttcatatcatcgcccatttcttccaattcttcatccacctgttcttctgccggtgcattgctggccagcagtcgttcgatcatgaactgcaaaaagccgtcttcagcagaaagctttgttcctccgccgaaaccaatctcacggatcttgtaaacagcatagccatccactctgttctgacccgacagtcggacattgatatgattctctcccaaccacttcagcagactgacaaatctggaatcaatcttcaggatatccgctgaaaattccccatcttcctcctgaaattcaaaggacgtccgcttcaccggattcgtaaacataccgcatacgtgatgctgccattgacgctttgtattatccaggatcataatcggcttctccggtgtagctgtctcctcatttgattgaaatgttgtatacgtgcactccggctgcctgctatcctccggtgctgcactgaaatcaaaaactggcattattatcgctcctcttctttgtatgctctaaaacacatttatcgccaaaacatataaattcattgtaccatatgatcagccatgacttcaattgtttctgcataattatgcattataattgcagcaagccgaaaaatccatgaaatcatcttttatttcttcaaaagaagccaaccgacaccccatgaatgtcggttagcttaatttttacacggacttacacaccatacgccgcactggcgcccagcatatcttctatcctcaacagctgattgtatttcaccactctgtcgcttcggcatggtgcaccggttttgatctggccggcattgacacccactgccagatctgcaatgaaactatcctccgtttctccggaacgatgagaaacaatcactttataaccagccctttttgctgtctcaattgctttcatcgcttctgatacggtgccgatctgattgactttgataagaatggcattggctgcccccatctgtatcccccgctgcagtctggcactattcgttacaaacaggtcatcacccactaactgaactcgattccccagttccctggtcatatgcacccatccttcccagtcttcctcatccagtccatcctcaatagaacgcagcggatacttctccgtcagttttttataatacgcaatcatttcatctgctgaacgcacaacggaactgcctttcaggcggccttccccctcgaaaatatatttgcctgtctcgtcgttatagagttcactggcggcagcatccatcgcaaatgtcacatcttctcccggttgatagccggccctttcaacagcccgcatcagataatccaacgcttcctctgcatttttcaaattcggtgcaaatccgccctcatccccaacagctgtcacatggccatcctccaacagtagtttccgtaaaacatgatacacttctgttcccattcgtaaagcttccctgaagcagcatgctcccacaggcataatcataaattcctgaaaatccagcgctgaggttgtatgtgcaccgccattgatgatgttcatcatcggtaccggcaatatatgggcataggttcctcccaaatactggaataacggcagccccgacatctctgcgccggctcttgccgatgccatggaaacactgagcatcgcgttagctcccagtctcgatttattctctgtgccgtcataggcaatcatcatacgatccagatgcatctgctccgtgacagaatggcctgcaacaatatctttgatatccacattcacattggcaactgctttattcacaccttttccatcatagcgatccttctcatcccggtcccgcagctccagggcttcaaactttcctgtagaagcaccggaaggcacagaagcacgccccgcaatgcctgcttcacagataacctccgcctccaccgtaggatttcctctggaatccagaatttctcttgcctttacatctaaaatcggacaaaaaatacgcatcatgatacagcctccttttagccgcggcgtcttctaagtcttatgcaagttgtaaaattcattgattctaagcaggcacgctctcgctgcacaacgctggcagcggtactaaaacggtacaaaacaccgtttaaggaccggccgcgttgaaagcacctgcttatgaatcaatgaattttacaactttttcatatattttctaaagacgccgctgtctataaataatctgtatcagtatgcgtatttttatttatattattcgtctataagttatatagtattttaacgctaataaaggttctcttatcttctccgcatttcccaaaacgctacagcacttgcagctgccacgttcaaagaatccacaccgtgatacatcggaattttaacggtgtaatcacagtctgctatagtattggctgccagcccgtctccctctgtgccaagaacaatggccagtttttcttcatgaacaagctgtggatcatcgatgctgacggagttatcatcaagggccatggcggctattttgaatcccatttcatgcagccgtcccacagccggctccggccatgacatctgactatccataaacgtccagggaatctgaaaaacggttcccatactcacacggatggcccgacgataaagaggattgcttgaagctgatgtcagaagaatgccatccattcccagagccgctgctgagcggaaaattgctcccacattcgtcggattcataacatcctccagaatcgcaattcttcgggcatttttgcagacatcttccactgacggcaaaccttttcttcgcatgacacagagcatacctctcgtcaacccaaaccctgtcagctgggtcagcacatcaaattcagctgtatacaccggaatatccccgcactgagccaatatgggagcagcctgtccctccacatgtttcttctcaacaagacaggatatcggctcatatcctgcatccaaagccgtctgaatcacctttgggctttcagcaataaacatggcatttgccggatctttgcggttcaataactgattctccgtccaacgggcataaatatccaactccggtgctgaaaaatcatggatttctatgatattgaccatttccttttcctttccaaacagcaactctcaactgcttcctgtcaaaatgactcatctaaagcaaggagcctatttattcaataatcgttccacaagatgcacggcttccgcagcatcccgcgaatatccatcggcaccaatctcatctgcgaaactctgagttgtaacggcaccgccaataatgatcttgctgctgcaatgctttgcctgtgcaagttctaccacgtcacgcattctcatcatcgtcgttgtcatcagagcagaaaggccgatgatggccgcatgttctttaacagccgtctcaataatgcattctgccgatacatctttgccgagatcaatcactctgtaaccataattcttcagcatcagcaccacaagatttttgccgatgtcatgaatatcgccttccaccgtcgccataatgatggtggctttttcctcctcatcatccttgatcagcattggctccagataattaatcgccttctccatggtttccgcactggcaatcagctggggcaggtaatatttcttctccgcaaacagaacgcctaccttctggatagcggtgatcaaatgtttttggatcatatcatccggcataataccggcatccagaccttcttttacaaggttaataatactgccctggctacccttcatcacagcctcaaagattttctctcccggagtcagaaccactgctgccgccgtgctttctccgctctgctgttctttgactgcgttcatgcggttgatatatcggatatctgcatcaggatgattcatcaacagatcagatgcaaaagcagcgtgcatcaaaaggtcctgggacggatttgcaatggccatggtaaggcctctgctaatagccatggtcaaaaaagctgtattaacataggagcgttctggcagaccaaaggaaatattagacaaaccgcaaatggttgccaattcaagctgatcatgacaataagaaatcgtatccagtgtttcaatggctgcatttttgttggcaccaatggttgccaccaggccatccaccacaatgtcctctttatggaagcccaactccaatgcacgatccataattgtatgaataatctgaatcttttcatctatattcttcggcagcccctcatccgacaacggcaacaaaataaacatagcaccgtattttctcgcaatcggaagcaaatgttcaaacttttccttctcaagggaaatagaattgatcaacgcacgccccggataaacacgcagtgccgcttcaataatatctacatgacttgaatcaatgcaaagcggcagattcactgcttgggtaacaatctcaatggacttcagcatcatggctttctcatcgataccattcatacccatattgacatccaaaatcgatgcgcctttctcttcctgagccaacgccatatccatgaccatatccatctggccttcccgaagggctgcctgcagtttcttcttgccggttggattgatacgctcacccacaaccttaaaaccggcatccagtccgatttccagtgtctgacgttccgaagccagtacacgtttgtatgtttggctgactgccggtacaggatatgccttggctgcctccttaaatgcccggatatgctctggtgttgtaccgcagcatccgcccacaatgccggcccctgcctccagaatcaatctggcctccgcagcaaattcttccggtgtcatacgataaacagtctcaccgtcaatcacttccggcatgccgtcatttggcttggctataatcggaatattggcgtatgccttcatctcacggacaagttctgccatctgttccggaccggttgaacaattgacgcccaccgcatcagcccccaaagactgcaaaactaccatggccgtacaagcgtctgttccaaaaagtgttcttccgtcttcattaaaagaaagcgtcacacacaccggcaggtctgtcacttcgcgaatggcaatcagcgccgcacggcactcattcagactcatcattgtctcaacaacaaaaagatcaactcccgcatccaccagataaccggcctgttctttgtaaatatcaatcagttcttcaaatcccatatcacccataggtgccagctgacgaccggtcatagtcatatccccggccaccaaacctctgtccccggctgccgcctttgaaatggctacaagctgatgattcatctcttcaatcttatctaccagcccgtactcatccagtttgattctgttggctgtaaaagtcggagccaacacaatatcactgcctgcctcaaaataagctttctgcagctgcatcattgtatccggatgttccagaatccaggcctccggacacacacccgtaggcatgcctgccttctgcagattcgttccggtggcaccatccagaaaaacgattctttctctgcacaatcgctgaaattcttctcttgtcatctatcttaactccttcttcgcctgtaaaataatccgtttgatcaatgctgccctgttaaaaggtgtcatcatataataaccgtcgcacacatcttccagacgtttcatcaaatccacactgatggcttccgccacatcttcataagcctcacggctcataccggcctcataccgctccagcacctgatccggcacatgaattcccggcatctcattcttgataaaaagcgcattcttcctactgaccaaaggcataatacctgctataatcctgccgccggacttttccttcagttccttcaacctgtcaatatcttcctgtccgtaaaccggttgtgtcagaaaccattgtgcaccggcttccatcttctgacacattctggctgctatattgtctatggaaccattattatgattcagggcaccgccataataaattgggcggctgccaaatacttcctgattcatcgtctgtatatacttcatcagcttgatggaattgaaattaaaaacgctcttaatactctcccggtcacctctggcaatcggatcccctgttacgatcagtgcatgccgcagcccgttcatctgcattcccagaagctgggaccgatgggcaatcatgttcttgtcacggcagcagatatgtggcattgcctccatctgtcttgtataacgcatcttgatggcggaagcaatcgaatcggctcttggtctggccagcggagaatcggccagcgtgatcatatctacattaatatcccggagtaaagctgccccttccatgagttttgtatcattgacatcaaaaggcggatccagttctaccacgaaaaccttctccccgcgttcaagtttctgtataaaatctgttttctcctcaacggcttcttccgcacaattttcctttccatctgcactatatacagcaggcatcagctttttgggcggtctcacatcattcaccagcagatcatgcaatcccctgatatgctccggtgttgtaccgcagcagccgccgatgatatcaaaaccaagggctgcgattcttcccatcatgtctacataataaggtacattttcagaataaaatgttcttcccctaagttccgtcggataaccggcattcggcagcactgtcatgtacttgccctcaggaaaactctgattcttcagaagttcatacaaatgaagagggcccaccccgcaattaaaaccaactgcatccagttccttcatcgctgctgcttctaacagaagtgcccgtacactcaaacctgatcgggtatagccattcctgttaaaactgaactgcgtcacaatgaatgcatccggacactccgctttaatataagcaattgcctttttcacactgcggagctcggataaagtttcaaatacaaaaatctttgctcccaaccccaaaaaacaatccgccagatggatgtattcattctcaacatccgcagcagatttcgtctcattctcatcaataggccccatatccgctgcaatccatacatctctgccgctgtctgatacagcctgacacgcattctcccaggccgcttttaacactgcctcaatctcatctgccgaaaaaaacatactgttcaccgcaaatgtattggtacgaatcaaccgtgccccggcctctatatacgcacggtgaatgtctctgatctgctgcagatcatccaaatttgcacgctctgctaactttcctttgtatcctgtcaaacggtcgtaccaggttcccatagcgccgtccgtaatcaatctgttatttgccaaatattctctgatatccataactgtatcttaatccccccggttctctgtaatttcccatatgtaatgaataacggttcggacagtcctcacgcccgcaatccctgcagatcgtgctgcagcgcttgtctttatctgttgtcagaataccgataaacacaaccgatttcatcggtctcagcgcgccgtcacgcgtcagccggatggcttcactgcattgaatctgcttcaaaatatctgccatacttccatctcctccttcatccggatcaggaaactgatatttttcaatatagacattcttcttcaccaattcatcttccaacagtccgtataaacattgaagggcctccattgccagacaatctgcggcataactgtcaagaatctgtcccttgtcagaccatttttccaaaagctgatcaatgccttctccaagcgtcgctgccgcaagaacttcctttccatgtacctcataccaaatctccggttccagtgctcgctgcattctgtaccagaccatctgtacatgaaccgatgacatcacagtctgcagtttgtacttcttcaatagttctgtccagtcctcactattcagttcaaccaccggttttagattctgtaccatttattgtcactcatttcatacaagtatagtagagttattatagcagaatccaatatttttcgcaacaaaataagccgcctgctgccctggtgatgacatattctatatctaaacagaattttcatcattggcagtaaacggcttattcttaatttcttttatctttttatcaatctacatccatttaaagcgcatctatttgctctcaagaatcttctcaacactgacaagcttgacacaaagtgcaaaaagcttggccgcaacagccagttcttcaactgtcggataagatggtgcaatacggatattgctgtccttaggatcctttccgtatgggaatgtagcacctgcacctgtcatcacaacgcctgcctcttttgccttggcaacaatcgctttcgcacagccctccaaagcatcaaaggaaatgaaatatccaccgagaggctttgtccatgtaccgatttcaagaccgccaagttcatcctccagtgtctgctcaaccatttcaaacttcggtctcagaatatcggcatgacgacgcatctgtgcttccacaccatatcgatctctgaagaaacgaacatgtctcagctgattcagcttgtcgtgaccgatcgtctgaacaaccatgtatttgcggatatctgccatgttggcatcggatgtcgcaatagctgcaacgccggaaccagggaagctgatcttagacgttgatgtaaacttgaaaaccatatccggatgaccggccttagcacattcttcaaggatctccaggatttcatccctcttatcttcatacagatgatggacactgtaagcattatcccagaaaattctgaaatcttctgctgccggtgtcaatgccgcaaaacgtctgacaacttcatcagaataggaataaccctgtgggttggaatacttcggtacacaccagattcccttgactgccggatcattattgacatattcttctaccatgtccatatccggtccatcctcatgcatcgggattgtgatcagatcaaaaccaaaagtctctgtaatcttgaaatgacggtcatagcccggtgccggacaaaggaatttcaccttgtcaagcttgcaccatggtgtatgtccaagaaggccgaacatataagctctcgctactgtatcatacatcacattcagactggagttaccaaaaatcataatgttattcggattcacttcagcaatagaggccaacagtctctttgcttccggaataccatccagtacaccataattacggcagtctgtgccatcttcacatttcagatcagactcactgtgaaaaacatccatcattcccatggaaagattcagctgtgcgatagaaggcttgcctctggacatatccagcttcagccctttctccttgtatccctgaaattccttatcaagttcttccttcaaagagagcagttcttctctgctcattgatgcatacgccttactcatcattgttgacattcccttctgatcacagagtgcagactgcgctctatgtatacccttttattcataatacaaattgcgctcttattataacgctaagcgatgaatgaatcaacaatcttttgcaattttttgcaagttaattaatataatcctgcaatttcagcatttttcgtgaatattaccagtgatttttgcattaaatcggtttcttttgtccattatttaaaattacgataactgtcccagacagtaaggatcactcagcaaacccttctcaacttctctttctgcatgtcgataccatccgatataccctgcatataggttgcctgaagttcagcctccttcatcagataccatgcctcttcaatccgatccaatatcgcacacaactccggtgaaagctctttcagcatctcttcatattcttcacgtacctcttctgatgcttccagttcttcctgatactgatctgatgtctcccaccatgccatgttctgcaatctctgaatctctaacaactgttctaattcgacgatttccttcctcattttctccacctcatcttctattctcaatgttatcctgcaactcacatgtaagcattacaaactataacacaaaaataccaaaatgggtgtcgaaagccgtcgaacaggcaccccaaagatttcgacaaaaatcggcatccatgcgcaatcaatatcgctgtttcgaaaacaatatagattatctctcactgatgcttccttttttgatgccgcagtctgctgagagattctgagcgaatgccaagaaaagaagcaatctgctgattacttgcaatctgatcgacttccggccactttttgcagaaccattcataacgcttattgcccggcaaataaagccgcttgatattgatctcattctgaaattccagcgcctgatgcagacatctgacatagagcttggccattctcggatattgctgcataaggtcaaaaactgcctgcacaggtatctccaaaacagtggtttcattcagcacttctacaccgacaaccgacggcgtttcttttccaacaaaaatttctacagaattcgcgaccattcccttctctgtcatgaaagaatctgtcatttctgtctgtgattcatcaataaaataacatcggagcatcccttcaataagaacataaaccttcttttgaatatcaccaatatcgtaaatacaatcaccttttttataatgtacaatctccgataagcttcccaactgccccgtcaactctggattatttaatggaatacatgcattaattgcttccactgttgtcataacatctctacccctgtccattctgtcttttctctatcatttccttgatatccatataatcccactgcagatcctttgtcaccagaatattttccaatgtttttgcctctttttcactttgcttcatctgtgctttcagacgactcaatgatttcggacgcattcttaaaaaggatgcaatctgcttattacttgcactggcctcaacctccggccatttttcacaaaaccactgatatcgttcttcagccgtcaggttcattctccgattattaatgacgcagagatacatcatggtcttctgcagatatcctgcatacacccagatcaatgttggtatttcatcggaaagctgaagtatttctttaatcggaacccgaaaaacctctgtctctgtcaatgctgtcatcccaaccgttgactgtttattgaaattttctacattcatgaaatcattcttctccgaaaaaaagcacagaacaaccggatgctgatgctcatcataaaaatatgtataaactgcccctctcagcaacatataaaaatgtgtataggtctctcctgctttatggatttcctgccttttcttgtaaatgactgtctctgaaatctcactcagtcttctgatcaccgcttgatcctgtgtacggaaaagttgcctgatcaatttttctgacaccatatatcattaccccttatattcatttttaagtcatgattccataatagtaacattttaaatatagaatttcattaacatttgttaatataatttttgttctaaaaaaaataaacaggttataaatcatgtttccttttcgctctataacctgtattgtccgtccatttcttttctcacatcagcagaccatcaattttttattacacccagcgctttgtttctactttttcaaaacggtatttctgctgcacatccgggtatttggttctatctacctcactcataaacatcccgtatggtctggcacatgttttatacggcggataaagcgcttcataaatcaccagtttctcacctgtttccgtatgctgtgcaaatgccagaactttgtataagtattccgcactttcctctgatacccattcccgtttgaaatgtcgaacaatatctcccacttcaatgtccctttcaagaacatcctctgcagctgcttcatctcccatagattcggaatgaccattctgttcatccatccggacattctctgctgccacctgctcagtctttccctgcgcatccagttcaatatattcctctctgtcaatggatacaggaatacctgtctttccctcaatgtgaacaccaccataccaggtacctgttactttacagatatctcctacttcgtattccattgtataatcatcttttttctttatgatctttacttgtttcatgttcttctccacttcttctgattcattacaattcccgctttttccgcaccgcttcattcgctttccgtttcaccggattcatccggacacctgattcaccctcgacatcaatacatccagaatctcctttgcaactgccagtttgtaagtcagtcttgtaggctgcactgccagttcaatataataggacttcatgtctccgttaatcacaattgcaaaatacacctgcccaggaacggatacatccggattagccggatctatatttcccatggttcctgtcacaccgataccgatatccgcttgataagttttcgcacaggctgctgccattgcctctgctgtttccttggaatagaccgtatacctgtcaagtatgtcggccggcaccccctgcataacttttgcctcattgcaataagtcacaaaagcccccttgaataccgccgaagaaccctctgtatcagtgatcaacgaagcaatctgaccggaagtcgcactctccatggtcgtgatcgtcattttcttctctatcagaagtttcgtcaattgcctgtatcctttcctgaccgctgcctcctcgtattttgctctattattctcggagattgcctttgcattcaccaaaccgccgcatttatcacccatgtccggcttcttcaaattctctgtatatttttcaaccatacctttaaattcttcttcaacatccctgtaatgcctttctctgaaatccggttccgacatcaatataggcgtctgtctgcgctcttctcccggcatcattattctaagttcatgctccatcatctcatcatcaatctgcttgcagaactttttctcttcgggtgtcagatccgccaattcaaaataatcataaatgacatccatgatctgtgcctcgatgtccagataattcatcagataaggtttcaccggccggataatatccgcaatataagcctcactggcgtcatgcagcaaacatgccagaacaattcgccccgaccatcctctggcagctgcttcactggcacaattcatcgaatgctgcgccaccgaaaaaaaatagcggatatgcccaccgcccctgcaaaccaagcttagtgcatgggcaatatcctccacacaaacatcctgtttcatcatcttcagcggatcaaaaatccgcccggtaaaagtattcattgcactcatctcattttactcctaaacacttcttctgtcatattcattcgtttagcagctccttgaatagtcagaatactgtctttaatcaaatttgttaaaatctgaagctttccttcttcatgctctatacatgcccgctcttttattatatcttctatagctgtacgcatatctatcctctccctcaggaatttctatagacatatttttctctgtatccaccatactatcatcagtcatttgattaatcaagtccatttcccgttcaattctcttctcattctgcccccattcgacacccttcgacagattctgatattcttcgccagcaataatccaaattcataaacttcattcacgccaatcgaacatacaaaattaaaagcccgatcgatgaatcttccttcgaccgggcttttaatgaatttcctgtaatttcattttatacaccttcaactttcatagaattcgattggataaattatgttccttttggactatacctcctattcataaatttgcatgtccactatgggcctctgcctttcttcataatcatcatctcctctgttacatgtatagctgttaacgacatctatgtaaactcgtgagagattattattcgatttgatcaagacttcttatgccattggaccgtcctcctgttctaagactcgactacttctaactatcctcttggtctaatactggaataaacttcctttgtttctgttaggcatctcctctttgttgtctttatagtaacacagttattttaaatcgtcaatagttttctttatattaatctttcaattataaatattcagaattttcacactttttaagtgtactcacctactatatacgtcttcccctcctcttctctcttcctgcagaaacatttctatcttctttctgactaataaaaaagcgaaactgtctgtacataaataaatatgccctccagtttcgctttaaatctacaaggatttgcaaatctcttatatctattacatttttaagatgacattgattttgtcttttagtatatctgcaaatatctgaccatcttcagctttgcctgctaccgaaccataatgtgtcggtactgctgctttcggatgaatcatttctgccagctcagctgcctcttctgctgtcattgtatacgttccgccgacaggaatcatagccacatcacactggattttcttcacatcctcattgatatccgtatctccagcaatataataagtcacctcattcattgtcacaagataacctacccattgattctgctgcggatgaaactgtttgccaatattgtaggcaggcactgcctgaatcctgacaccattgatctccagttcatctcccggagctaccaattctgtaaactcctcagaaataccgctgttgctcaatgaatccttcattgacttcggacagacaagaatcgttgctgcattttttaccttcgccagatcttccggtgaatagtgatcaaaatgttcatgggtcacgcaaataatatcagcatcatggatttcttcctccacatgaaatggatcaaaataaatgatctgatttcctgctatacgaatactgctgtgagttaaaacctgaacttcttcatacattatctgttacctccttgctttttctctattctaccatatccggcactctctgtccttatgaagctgaattttctttggctttcttgaaagcctcatccaatgtatgccaacccaagactgcacactttactctggcaggcatatgggcaatatctttcaatgcagaagcttcttccaactgatcgatttcctcatctgtcgcttctccctgaatcatacgcaggaacatgtcaccaagcttcaatgcctcttcctttgtttttccaaggatcatccccagcataatgtctgcggatgcctgggaaatggcacatccatctcctacaaaggcaccatcttcaatgacatcgttttcaactttcaatttcagaaaaatatcatctccgcagtttggattgactccttccagaacaatattggcatccggaagatcatgtttatactccggccgcagattatgttctgtcaatatttcattataaaaacttctactcttcatatcccattctccttcttatgctggcaacgctctttacaaaagcatccacttcatccaatgtattgtaaaacataaaacttgctcttgtcgaagaatgaacgccaagataggtcagaagcggctgagcacaatgatgaccggcacgaacatcaatgccgtctgaagcaaggatttcactgacatcgtgcggatgaacaccctctactgtaaaagatacgatacctgtatggtttgccggatcttcagagcccatcacatgtacatgcggcaccttagccaatccttccatcgcacgctgtgttaaggccagttcctgctcctggataaaatcaaagcttacctgattcaggtaatcaatggcagccgccaaccctgctgcaccggcagcattcactgttccggcctcaaatttatacggtaattccgcaaatactgccccttctcgtgtcacggaatctatcatttcaccgccggtgagaaatggcggcatttcttcgagcaatactttcctgccatataatacaccgattcccatcggccccatgagtttatgccctgaaaatgccataaaatccacatccagtttctgcacatccacaggcatatgcggtacactctgcgcaccatccattacaaccactgcgcctacttcgtgtgcgcgggccacgattttctctatcggattgacacatccgagaacattggatacctgagccactgccaccagttttgtcttctcattgattaccgtctgaatcgtttcatctgtcaatgtgccgtcagtttcacactccataaactttaattcagcaccggtctgacgtgccaccatctgccatggcaaaagattgctgtgatgctccataatagtgaccgcaatctcatctccagccttcagatggctgaggccatagctgtaggccaccagattcagcccttctgttgtatttcttgtaaaaataatctctttcttggaagttgcatgaataaaatcacgtactgtcgctctggcgttctcacaactctcggtagccttcaaactgagaggataaaagcctctcagcgggttcgcattttctgtctcatagaaaaccttgactgcatccagtacagcctgcgggcgctgggctgttgctgcattatctatataaatcgtatcctcattctgtaaaagagggaaatcttttctgtaatcactggctgtcattgctcatcacctttgtaagctggtctgctacaatcctttctgtttcttcatcctgtatatgctggtagaggacttcaagttttgcttttgtcataatatcctcggctgtctcctgatcgatgcctctggccgcaaaatagaataatgtttcttcatccagttcaccaatggttgcgccgtggctgccatctacatcctcttctgcgcaaagaatcaatggaatcgtcttattctccacatcatccccaagcagcagtacattctcagtttctgcacctttggatcccgatgaaccgcgtttaaaatcaatggaacctctgaaaactttctttgccgcatcttttagtgtaccgtctacctgaatgtcacaatttgtcttctttccccagtggttgataaccagattcatatccaatgtctgctgtttctggcaaatatagccaatctccgtgtgtagttcagactggttgccttccagttctgtctgaatgccgttatatacatcacctctgccgacaaacatctgaagaacatcaagctttgctgtctcgtcgcagacagaacctactgcgttcagtaatctctgtccttcatccagcatattgatctgtatcagacgaatcgtgctgtttttcccagcataaagttttgttctgaatgccagatcactctgagcttttttgccggatgtaaacttctcaatcactgtcacacgggcattttcttccgctgcaatataaacagttcccgctgcattctccttatcttcactgctgatatccagtctgatgactctgtcactagcttcagactttgctgtaaactgtaaaatcggaagattctcatcctcaaatatcgcatccgcctcagcgccgacgcctgttgtcatttcctttatattcaaaccggcttcagatacctgttccggctcttctgccatcaccatgcaaggctgcacatccccattccatttcactgttgtatcatttaaatggagccagtaccatgttttggatggcagcggattaatctttaatgtctcattctctttcatcttcaaatcctcctttaccctatccaatactgcctttcatttcaagtcgaatcagattgttcatctcaagtgcatactcaagaggcagctcctttgatacgttgtccgcaaatccactgacgatgcatgctcttgcatcttcctcgctcatgcctctggacatcagatagaaaacagcctcgtcactgatactgccgatctgtgcttcatgacctacattagcattcttggtacggatatccatggcagggatcgtatctgatctggattccgaatccaacatcaaagactggcaggaaaccgcagattttgcactttctgcacctttattcacaacaacggatgaacggaatgtactgataccgccatcctttgaaatagatttagtattaatataagaacttgtattttctccaatatgaacaactttggcacctgtatccagattctggcctttgccggcaaatgtaatgcctgtaaattccatcttggagtcacggcctttgagaatgctcatcggatacagataggaaacatgtgaaccaaaggaaccggatacccattcaatggtacctccttcttctaccaatgctctctttgtgttcagattgtacatattcttggaccagttttcaatcgtcgaataacgaagtcttgcattcttgcccacaaaaagctccacacatccggcatgcagattggcgacattatatttcggtgctgaacagccctcgatgaaatgcagatcggccccctcatccacaatgatcagtgtatgctcaaactgtcctgcaccaggcgcatttaatctgaaataagactgaagcggaatttcaacagaaacccccttcggtacatacacaaatgaaccgccggaccagacagccccgtgaagtgcggcaaacttatgatctgtcggtttcaccagcttcataaaatgcttcttcaccatatctgcatattcaccggtcaatgcactctccatatcggtatagacaacaccctgtgcagcgacttcctcacgaacattgtgataaaccaactcggaatcatactgggcaccgacaccggccaatgactttctctctgcttcaggaatacccagacgctcaaatgtattcttaatatcttccggcacatcggaccatttggctttcatcttcgtattcggtctgacataagtaacaatctgatccatattcaagccttctatagatggcccccaatccggcactgccatctcattgtaaatttgaagagaatgcagacgaaaaagttccatccatgcaggatcatgtttctctttggacaatttctgcacaatttcaggcgtcagtcctgctttaatcctgtatgcgtctttttcatcatctttaaaatcatatatgcttctatctatatcttcaacttgactcttttctttcaccctcagtcactcctttcccacgccgcttttactgctcctgagtttcataacttccgaatccgttttcattgatctcttcaacaagggatgcatctccagtcttgataatcctgccttcaaccatgacatgggtataatccacatgcagtgcttccagaatttttgtactatgtgtaataacaattaaactgcctttgcatgtcttctggtattcttcaatacctgctgaaactgtacgtactgcatccacatccaggccagagtctgtctcatcaaggatggccagtgaaggtttaagcatcagaagctgaaggatctctgccttcttcttctcaccgccggaaaagcccacattcagatcacgttccgcataagacggatccatctgcaaaatagccattgtcttctcaagatctttcttgaaatcccacagtttgattctcttgccggttttctgttccagtgcatttctaataaaggaactcagtgtcacgcctggaatctcaagcggattctggaaagaaagaaaaataccgtctttagcacgctcattgactggttccgccgtaatattcttgcctttaaaccatatttcgccggacttcacagtataacgtggattgcccatcagtgcataaccgagggtagacttacctgtaccgttcggtcccatcaaaacatgcgtctccccttcaccaatggacagatccacgccatgaaggatttctttatcttcaacatcaacatataaatcttttacattcaataactgcttgttcaacatttttatgcctcctacttgtttcttctctattataattatgctgtattttcctgtgttatctgtatctattcatcgaaacggcccttcccagccacatcagccagtgtcatattatccagataatctgtgataacattcgacaatccctgccatactggcagcgtgcagcaaagctctgctctcccgcaaggttctgcattatccttgagacaggatacaggtgccagtgttccttcggtcaatcgaagaatgtcaccgactttatatgcctccggctttctggtcagatgataaccgccgcctcggccgctggttccttcaatatagtgttcctttgacagcattctggcaatactctcaagatacttcagagaaatactctccgcttccgctatctctttcagcggtacaaactcccggtctgcattgaccgccaaatacgtcatgacccgcagtgcataacgtccctttgaagaaatcattatcatcctatattcattcctttcctttttctatgggtatgatatacccatttacctactatgtcaataggcaattaaaatagtgcgtcatctaaattaaaaaacacccgccggatttattccagcagatgattttcattctgtatgccgtatttaatttgtcactgttttttgaaattttatttagcggatacgctacaccgatgaaatgcttagcattttggaggttagctctgaacagttaatttaatttcttgaacacttctctgcatctatcgccagaacaaacatcagcacatataatgcatcttccggattcacgatatccatcacgtaagtgtccgtcatatgaaaaagctccttcgaaattgcagcaatcctctgtccgcccgatccaacaatcgtatagtcccattccatataaccgccctcgatatgccagccgttaaaatcaatatcgtatttcggcttcaaaaatgtcaattctttctgaatgcagccaatatatctttctttttcatagacttcaaacttcggaagcaatgtcaacaccttctctttgactgtcccgacttcttcaccgtaaacactgaaaatcttcagacaatgtccccaggccaactgccctttaacaacataaactgtctgttccgtttcatcatatatatcataactgtcaaaccatgaaaacaaacgctgcttaaacaataacttcgtttcgaacacctccttcaagatctttccagataaaatccgatccttcccaagtcatatacccatgataactgttttctttcgggatggataccgaacccggattcatataaatatagttctcatgcgccacacacttcggaacatgagtatgaccgtgcaaaagaatatcacctttatgcagcggcggcaaatttttctcattgaaaacatgcccatgggttgcaaaaatcatccgcgtaccagctgtcaaaattgcatattctgccatcaccggaaattccagcaccatctgatccacttccgcctcgcagtttccccggacacagagaatatcgtctttcattccattcaaaagctcaataactcttttgggctgatatccctccggcaaatcattgcggggcccatgatataaaagatcacctaacaacagcatccgatctgccttttcctgtttgtaagcctcaagcaacttttccagataagcggccgagccgtgtatatctgatgcaatcatccatttcatctcttcttctccttccgacaattcaacgctcattcctttatctattattgtcagaatagaatgattcgtcaagtactctcttgcacattcatggataaacggaacttttatgggcgaaaattcttcaatgcatccatcgtctgctgaatcagttcttccagactccattcaagcatatctgcccctcgctggataacttctttggaaaattctatttcttccataatttattcttgtaaacataaaaagcacgtgagattcttacctcacgtgcttatcttatatgtgtacaaatgccattttcacaaaaagcaactgtattatactatttttctaacaaaggccttagaacttgccagctcttgctgcttcctcaacactaactgcaacagcaactgtagcgccgaccattgggttattgcccataccgatcagacccatcatttcaacatgggccggaacagatgaagaacctgcgaactgagcatcagaatgcatacgtcccattgtatctgtcataccgtaggaagcaggacctgctgccatgttgtccggatgaagtgtacggcctgtaccaccgccggaagcaactgagaaatatttcttaccctgttcgatacattctttcttgtatgtacctgctacaggatgctggaatcttgtagggtttgtagagttacctgtgatggaaacacctacgttctcgtgatgcatgattgcaacaccttcctgaacatcatctgcaccgtaacatttaacagatgcacgaagacctgttgaatatggtttttcatatacaacgttcagcttgttggctttgtaatcaaactgtgtctcaacaaatgtgaaaccgttaatacgtgaaataatctgagcagcatctttgccaagaccgtttaagataacacgaagtggtttctgacgaactttgttagctttttcagcgataccgatagcaccttctgcagctgcaaaagattcatgacctgcaaggaaacagaagcattctgtttcttcttcaagcagcatcttgccaagattaccatggccaagaccaaccttacgatggtctgcaacagaacccgggatacagaaagcctgaagaccttcaccgattgctgcagctgcatcggaagccttacggcaacccttcttgatagcaattgcagcaccgactgtatatgcccaacatgcattctcgaaacagattggctgaatcttcttaacctgttcgtatacatcaagacctgcgtcctttgtgatcttctctgcttcttcgatagaagcgataccgtagctatttaaaacagaattgatctgatcaattcttctttcatatgattcaaataaagccattttagattactcctttctcgggtcgataattttaactgcatctgctacacggccatactgaccttttgccttttcccatgcagtgttaggatcatcgccattcttgataaagtcagtcatctttccaaggcttacaaactggtaaccgataacttcatcattctcatcaagggcaaggcctgtaacataaccttctgccatctcaagataacgaacaccttttgcctttgtaccatacattgtaccaacctgagaacgaaggcccttgccaagatcctcaagacctgcaccaactgcaagaccgtcatcagagaacgcactctgtgttctgccgtatacaatctgaaggaacagctctctcattgctgtgttaattgcatcacaaacaaggtctgtattcagagcttccagaatggttttgccctgtaaaatttcagctgccatagcggctgaatgtgtcatacctgaacatccgattgtctcgattaaagcttcctctataataccttccttaacattcagtgtcagcttgcaggcaccctgctgtggtgcgcaccagccaataccatgtgtaaagccggaaatatctttaatttctttggaatgaacccatttgccttcttcagggattggagcaggctcatgttttgcgccttttgcaacagggcacattaattctacttcatgtgaataaatcattttgtgactcctttcaaatatgtatcatgcaaaatttacatcatatctgtttactattttcccatcaattctcaatgaagtccagtgttttttgctcatttttttatttttggcatctttgataattttatgacaaaaacaggattgttcttgcatcaatacatctaatatttgttttcggaatagcaatatgtagaaaaatcatagaaaatctgtattcatatacgttaaaatcacagtgattattacaaaaatgacaatccacccatcgatcactcgtcctttttcaccgtcattttgcagacttcgaccattcatccgaaaggtactgtagatcaaaatgccatttaaaaagatgaaaatggtcagcacaacagccattgtcaccaattgctgaataggcacatcggataatgtctgtgatacagattccgtcacttgctgctgattcaccgacgcatccgctattagtctctgattggccatgaagttcattgtcacattgaaaccattcaacaggaaatgcatcagcatggatgtataaattgaaccggttgcctcaagcatcagtgccaaaactatccccagataaaccgcatacagcatttgattgaaattcagatgaaacagcccgaaagccaatgcactaagccatattcccgtcgtcttagcccgctgtcggtatgcgccgtacaagattcctctgcataaaaattcctcattaaacgctggcatcactgccatcacaaacagcattggaaaataccccattctcatcatataaggcatgacttccatcacctggtttttcacaaaaaacatagaaaaacgattcaaaatcaccacaaccgggtacgcagaaataatcacggccaccgccatcttaatgttggcattggatatcggtgtaaaaagcattctttctgacaattgcggtctgttcttccgatatcgtatcagcatccataatgcccctgggaaaatcagcatcacctgtcccatgatgacatgaaacataacatcatggagaggtatccactgcatcagccactgatagcccatatacatggcaaaagttataatcaacagcaaatgggcctctgtgatctttctgcgcatactatgcctctttctttacaatctgatcctgcgttttaaaaatatgggctgctggtacataaccgcgaacagaggatgtcggataaacattcacattcggtccaagcactgtacccggattcagaacactgttgcatcctacctctacacagtctcccagcattgcaccgaatttcttgagaccagtctcaatattgccttcaccggtatgaacaaccaccagcttcttatctgacttaacattggaagtaatagaaccggctcccatatgtgccttaaatccaagaatggaatctcccacataattataatgcggtacttgaactttgttgaaaagtatgacatttttaagctcagttgaattaccgacaactgcaccttcacccacaatcgcattaccacggataaatgcacagtgtctgacttctgcacccttgccgatgatcgctggtccatgaatatacgcagatgggaatacagtcgcatcctttgcaacccacacatcttcacctctgtattcatagtcttcttcaggcaatgttggtccaagtttcttgataaaatcaccaatcttcggaagtgcttcccatgggtaggtgacggatgacaataactctgctgcaattgtttccgacaatgtgtacatgtttgcaatttttaatccttcatacattttgaatacctccatttattctatataaaagttactctgttgaaaccttacctgtctgcttcttcgcattggatgaaacttttttgatcgtctttccttttgctgacgggcgctgttctttcttgtaaaaagctgcacaccggtcatagttgccccgcaactgatactggttatgtaaaaccataaccctgcctgtacgatcagatataaatcgttccagtttctccatataaacatccgatgtaatactgccttccgccacatacgttagtcctttttcccaactggctgttaattctggattcagcagtgatcgaatggagttatctacaacttcatagaccatctctcccagctgtgtcggtgtcacaatctgtgtctttttattcagcgccaggtaacggattgtaacaagctttttgagaatctctgcccttgtcgcacttgttccgattccggaacctttgatctgagctcgcagttcctcatcttcgatcagctgtcctgcattttccattgccagaatcagtgaaccggaattgtaacgcttcggaggcgacgtctcgccttctttgatcatcaaccgtttcacaggcagatgggaaccctttttcaaatccttcagcatatccagaaaggctgtatcacaccctacatcttctgtttcatcgtccttttgtccctgtgtattctgagctttcttcggaataccggcaactttcagatagccttcatccgtcaaaaccttgaaactggcataaaaactctctgtccgcaccttcaatgtcatggataactttctgtactgtgccggcggataaaaaatactcaggaaacgtctgcagatagcttcataaacgctttctgattgtggatgaagacttctcagagcccccagcccctgaccggtcggaataattgcataatgatctgtaatctgtttgtcattggtatatcgcgtagatgcaattttcttatagctccccatagccagtactttatctgcaaaagcagcaaaagccggcacctgtttcaagccgctgatatttctgtcgatttccttcgctacagccgttgaaaggactctggcatcggttctcggataagtcaccagtttcttctcatataactcctggactattttcagtgtttcatccggactgatcttaaacatacgcgagcaatcattctgaagttccgccaaattatataaaagcggcggattcttcttctctgtttttctctcaatggctgtgacttccgcttccatcggctgcacacgctcaatatatgttatcagcttctgtgcatcctctttcgtcttaaatccattctctttatataaaaccggtttctgccatgccaccgattcttctgtcacacgccattccgcctccacttcccgtcccaggatatccgcaacagcaagtacccgataaaacggtgtcttgacaaaatgccgaatttcacgttctcgccgcaccaccatgccaagcacacatgtcattacgcgccccacagaaataacggtatacttcgtaccaagataattagacatcgactgtccgtatttcagagtcagcagtcgtgaaaaattaattcccatcagataatcttctttggctctcaaataagccgcatctgccagatgatcatattcagacaacggcttagcttcccggatgcctcttaagatttcttcttctgtctgagaatcaatccacaccctccgtttatctttttccccaacatgtgccatctgatccaccaggcgataaatatattctccttctcttcctgagtcggtgcagacatagatgcaagtgacatcctctcgattcagcaaacgctccacaatacgaaactgctttttcacatcatcaattaattcatatttaaattcttcaggcagaaacggcaatgtatccaaagaccatttcttcagcttcggatcataaacttccggataactcatcgtcaccagatgtccgacacaccatgtcacaactgcatctgctgactcaagatagccatccgatgcacgtccgccgacattcaatactttggcaaattctttggccacactgggcttttctgctatatataacgatttactctgcactctctattctccgtaaattttatattattatctgtcatttttgtttatcacatattttatcacacttgtcaagtcatgaaaaatttttccgaatcctttttattcgtgttataatacacttatctgcattttggtgcagacaaataaaatcatattaaatcatttatcgtaaggaggtttataatgacaccaaaacaacagtattataaaaatattgcagatacaatgatctcaaatcttaaaaaacgcggttttgaagctgattatgttcctgacagacaggccgcactcagggctatcgcaccttatctgaccaaaggaaacactgtatcctgcggcggttctataacccttaccgaaattggcttcaatacagccgtcaaagaagctgactgcatctttcttgaccgtacaatcgccaagacccaggaagaaaaagatgctgtctattccaaagttgcagtctgcgattattacttcatgagtaccaatgccatcacaacagatggccttctggtcaatattgacggcacgggcaatcgtgttgcttctcttattcatggccctaaaaatgtcatcattatcgcaggcatgaacaaagtctgtcctgatcttgattccgcctacaaacgtgtcaaactgtcagcagcacctccgaatactgtccgcctgaaccgcaagacgccttgcgctgtcaccggtcaatgtgcagactgtctgagtccggactgcatatgtacccacacagtgatcacccgccgttccaatattccgggcagaatcaaaattctccttgtaggtgaagagcttggctactaagatgcagcatcagttattattcttcgatattgatgggacattattatccaatgccacccatcagattccggaaagtgctctttcagccatcgctgctgctcagaaaaatgggcatctggttttcatcaataccggacgaaccatccgtactatgccgtcttttctcaaaacccttgggtttgatggctatctctgcggatgcggaacacgcattgtctatcatgatgaaattctgctggctcattcttttaccgaagaagaagggcagcttcttattgatctgatggacaaatggcacattgaagcctttcttgaaggctccgaagatgtctactgcaaacgcggcacttatcgccagagaattatgaatcaggtacgaaaatccttcaatgatgaagggcttgggctctcctgctttatcgaagaccgtaatttcatctatgacaaattcgtccttgtctctgataatcaagccgattctgatgctttcattcatgaaatcgaatcgttcattgatgtcatcgaccgtggaaagggcatgtatgaatgcgttcccaagggattctccaaagcttctgctatgcatctactggccgaacatctggatatctccatggacaacacatgggccttcggtgacagcagcaacgatctgccgatgttcgaagctgcagcacacggtatcgctatgggtgaacattcaccggttcttgaaccattctctgagatgatcacagataccgttgacaatcatggcatcgccaaggcacttttacattttggactcatctaaaatccgtggttttcccgcgcataaagggctgacgcagatatatctatccgcatcagcccctttttgacaatttcaacatcaaatattattcataaagcggatgtttatctgtcagtgattttacaatagctgttgctttctctttatttccttcgaagtctttcaatgtcaatgtaatggcttctgcaatctgatccatatcgtctgcatcaaaacctcttgttgttgcagccggtgtaccaagtcttaagccacttgtaacaaatggagactgtgggtcattcggaattgtattcttattgcatgtgatatgcacctcatcaagcatcttctcagcctgcttgcctgtcagcccaagattctgaagatctaccagcatcaaatgattgtctgtaccaccggatacaatcgtaatacctctcttcataaggcctgcagcaagtgcctgagcattcacaagaatctgtttctgataatccttgaagtcatcactgagtgcttccttcaatgcaacagcctttgctgcgatcacatgcatcagagggccgccttgagtacccgggaaaatagccgaattcagtttctttgcatattcttctgtaccgcagagaatcataccgcctcttggtccgcgaagtgtcttatgggttgttgttgtaacaacatgtgcataagggatcgggcttggatgcagacctgttgccacaagaccggcaatatgggcaatatcaaccatcagaatagcattaaccttgtctgcgatttctctaaatctcttgaaatcaattgttctgcagtatgcgctggcaccagcaacaatcaacttcggctgacattcaagagcaattctttctacttcatcatagtcaataaaaccttgttcattaacaccataaggtacacaatggaaatacttgcctgagaaattggctgagcttccgtgtgacagatgtccgccctgatccagagccatacccataaaagtatcacccggtttcaggaatgcctgaaatactgccatattagcctgagcacctgaatgtggctgaacattgacataagcagcgccaaacagcttcttggcacgctcaatagcaagattttcaacaatatctacatactggcatccgccataatatctcttgcccggataaccttctgcatacttgttcgtcagtggactgcccattgcagccataacagctttacttacaaagttctctgatgcgatcaactcaatattctggttctgtcttcctttttctaactggatagcttctgcaatttcactgtctacagcctgaatttcatcaaatgtgtacatttatgcacgacctcctttgttgtctacagagcacctttgggaactctgcttttcatgtataacatttcaattgaacttgaataccaattattcttctgtctgttcagcttcattcacacggataccaagttcttcaagctgcttctcatcaactgtatccggtgcattggtcaaaagacaggatgcatcttttaccttagggaatgcaataacatctctgatactgtctactttggccatcagcataatcagacggtcaagaccataggccagtcctgcgtgaggcggaacaccatacttgaaagcatccaagaggaaaccaaactgttcgtgtgctctttccttggtaaaaccaagtgcttcaaacatcttctcctgaatatcatcctggtgaatacggacactgccgccgccaatttctgtaccgttaaggacaatatcatatgcctttgcacgtacacggcctggatctgtatcaatatactgaagatcttcttccataggcattgtaaatggatgatgcattgcctggaatctgttctcttcatcagaccactctaataatgggaattctgttacccagaggaagttgtactggttcttatcaagcagtcccatcttgtctgccagttcaagtctcagtgcacctaaagacgcatatacaatcttgttcttatctgccgcaaacaggagaaggtctccaggctcaccctgcatagctgcaattaatgcctgcatttcttcatccttcatgaatttggcgaatgaagacttgatcgaaccatccggctggatggcaatataagccagaccctttgcgccgtaatccttcacaaaagcaaccagtgcatcaatcttcttacgaggcattgtgccctgtccctttgcattgatacctcttacagagccaccatctgcgattgcattcttaaatactgcgaactcgcagtctctgacaacatctgtgacatcattcagttccataccgaaacgtgtatcaggcttatctgagccaaaacgatccattgcttcctgccatgtcattctctgaattggcagcggtacatccacaccaatgatctccttgaaaagacgtgccagaagacgttcatttacatcaataacatcatcaacatctacaaatgaaagttccatatccacctgtgtgaattcaggctgtctgtcagcacgaaggtcctcatcgcggaaacatcttgccagctggaaatagcgatcatagcctgataccatcagaagctgcttgaacagctgcggtgactgaggcagtgcatagaaagatcccggatggacacggcttggaacaagataatctcttgcaccttccggtgtactctttgtcagcatcggtgtctcaatctcaagaaagccctcttctgtcagaaaattcctgataacagcacaagctctgcttctcatcataatattcttctggatatccggtcttctcagatcaagatagcgatatttcaaacgaagttcttcctttgtcttactgttctcttcaatatgaaatggcggtgtctcggattcagataaaattctcagctgctctgcaataacctcgatctcgcctgttgcaagattcttattcacagcaccggcacgttcacatacctgacctgtaacagcgataacgaactcacttctgagcttgcctgccttttcaaagatctcagtaccacacttattctcttcaaaaataatctgcaaaatacctgatctgtctcttaaatcgacaaatacaacgccgcctttatttctgctcttttgtacccagcccatcactgtgacagtctgtccaacctgagctttacttaattctgcacaacgatgggtacgtttcataccactcattgattcagccatattaagactcctctctctgctcttttgtataaatattaatcattataaactttttcaaattctttgaagccttctgcttcgagcttctcaatctgctgcttcatattcttgcgcatcggctgaatcgtaacagttgttccttctgcacgaagtgcctttgcacgcttaaagatctcgagctttctgtcaaggggcacattcttgccgataagaattgccagattcttctccgaaacaggtgtcactgtctccaacttgtctttcaggatagtgataatacgctcaaaaccgatggaaaagccgcatgcactgacatcctgtccgcagaacttgccgatcatcttatcataacgaccgccgcctgcaatggagaaattatatccgtcaatgctgatctcaaaaattgtgcctgtataataacccataccacgcacaagtgttggatcaaatgtaatcttcacatgctcattgatcatagcctttgcacaggaaataatatcatctacgccctcaacaacctttctgtcaaggtagttctctgcaatatcactgcagaaatcaccgcatgtcacatcaccctgaagggattcgtaaattgcaagataacgtgttacaacatcttctgcataaccattctcaatcagttccctgcgaatgccctcaaggccaatcttgtcgtacttatccagtgaaataagcaccgaaccaatagcctcttcttcaaaacctgcctgcaatgcagccgcacggagaatctgtctgtcgttgatatggatcgtaaaatctgtaatgcccacttcactaaaaatctgtgacagcatatcagatgttgcagctataagctcaatctctgccagattcgtatcatcaccgagaatatctatatcacactgtgtaaactgacggaaacgtcccttctgaggattatctgcacgccatacattaccaatctgaagggccttaaacggtgtcggcagcttctctttgttattcgcataatatctcgccagcggaactgtcagatcatatcggagaccattgtctgcaaactcctgcttacctgcctcgattgctcttgtcagatcagcacctctcttcatcaccttgaagatcaatttctcattgtcaccgccctgcttggatgtcaggttctctatatgttccataactggagtttcaatctgcataaaaccataggatgcatagctggtcttgatcatctgcagaatatgttctctgagacgcatatctgcaggaagcatatcgcacatgccctttacaggtgttttaatgaacttcattctatcgtatacactccttttaattattcaatcctaacgtttctcacgatttttgaaaaaacgcctgtatacattctagcctatattgtcccgaaccgcaaggtctgattttagaaagttacaataataaattctataaaaagccttatgcggcaataatcagcttattgcacttatgtaaatatcgataaacatggtctgacagcacttcttcatccgataccacctgatgattcatcgtccccacgatctgtctcagatcccagtcactcatctcgtccataaccggcagcaaaagaacttcatgaatactgctgggcagcacaaagaaatccctcccaatgtcggacgcaaagcgcttcagacaatctgtataaaacaaaaccgaagctccgttcagccggatctcattcgtcaatacataaagtggcatcgttcctgtctccggcctctcctcaagaaatgcatcataagcttcagccatcggcccctctgccatctcatgaaccatatcctgtatcggctccaatacatccttccacagtctctgcatattcgctgccgctgtcttgtaaagatccgtctctgacacatgccaccacttcatcatctcattgctgaccaaaactgtgccgattcgactctgctcttcttcaactaatacccgaaatgtcactgcaagatctaacgccttgataaaaggacagtctgtgagctgacgactgtttctctcataattcactgccttcaggataatatgctccctgacattctcaaaatgctcaaaccaggcgccattcaccgacaagctgtctgcctcctgctgccgacagatgctgaccatctgctctgccaggtcatccggtgaaattccccgaagatactgctcataaatatctctcatgtaaaaaaccggtgcaaagttctctctctcctgccggatcgtcataatctccgacattacgccattattcttctcaacctccgttaaaacaacttccgcttctctgtcctcgttcaaaacggcctctacattctcccgaatatatgtcacaaactccccgtatgttaaaattgactgatgcatgatcttcctccccatatccttaactttgttccggccgtgaacttttgtttgtatttatattatagcggcgacatttcccttcatcaatgatgattcatcgacaacgccataagtcatccgacatcagtcaaaaccattcgtcaacactctcctgccatgcaccccttctaatgataaaaaaaccggcacagtttcctgcaccggcccacatattatgctcttacagccttctttaataaatgcttcagatcatccacactaaattcgtagtgtctgccgcaaaaatgacaattcacttcaatcggtttctgatcatcgatcatatcctggatttccttcttaccgatactgataatggctctctcaacacgttccttggaacagtcacaaacataacccgttggtgtctcctcgtaaaattccacatcaaagccatccagaacacggcggatcatgccctccggtgtctcgccttcctcgagcatcgttgttacagaagggagcttcttcacgttctcttccagtttatcaatcactgcgtcttctgtaaacggcatcagctgaagaataaaaccgcctgcctgtttcactgtattattcttctccatcaaaacacccagagccacacttgaattgatctgttcgctggtcgcataataataggtgagatcttccgcgatctctccggatacaagctgcgtctgcccaacatatggctctttcatacccatatccttaatcacactcaaaacaccgagatccagggccccgcctacatccagcttgcctttgctgttcggaggcagcataacatccgggttattcacatatcccttgacagtgccatcggactttgcagtcaccgtcagacctccgattggcccgctgcactgaatctgcagtgtcaaaagatccttctctcccttcatcatgctgcccatcatggcacctgcagtcagaagacgtcccagagcagctgtcgccaccgggctcgtgttatgtatctctctggccttctctactaaatctcttgtggatgccgcaaaaattctgacctggttgccggctcccgaagcatgtacaatataatctgacattttctattcctccatccgttttaaacggtctttttcccgtgctctcttgctacaaaataaaccctttcactatcaggcttcggtttattatacgtaaaagcatcataaattgcaagtacctccatacctgctttttcaatcaatgctctgactgtctccagtgaataagctctctgataatgggtttcgcagtaacgtctgaacaaatcgccctcttcctgaacaaaaactgtcaggtcatattcattgatcatttcttcttcatcataaaaattatcccatataaagctgcattcctcgcggtcttccgcaatggtctgctctccaaggatttcctggtacttgtaaacagtattcaggtcaaatataaaaataccgcccggatccagataattattcaccagggaaaaaacctgtaaaaggtcatcctcctcaagaatataattcatactgtcacaaatactgacggctgcccgcatcgtaccataaagttcgaattcccgcatatcctgcagaagatacaaaatatccggtgatgatttttcctttgcaatggtcagcatctcctccgaaacatcaatgcctgtcatatcatagccatgggcatcaagataacgggtcatggctccggttccgcatcccatatccagaaccaggccttcctccacaccatattttttcagcagggaaacaagatattctccccattcatcatatggtacattatccatgaatgtatcatatacctgcgcaaatcctgtataagcttccatacttcattcctttttcttattttgtgtatttctttttctgatcatgcctccgatccttcctgattcactggcagtcaatgctccccatccgcttttctcaattttttcaaaaagtccaagttcatcggcaatctcgtattttaattgttcctgcaatttaagtgtccgaattggcaccttttcaccatttttctttgttatctttctattcagaatatctctttccacgattcggttcatctcctgttcaacaaagagtctccccgctttcgcagatattattcccgattcattttatttcatagaccgcaatatatccggcaatcggctgtttatggctgattctctaaatttcaatccaacactttaatgcaaatgagtaaatcaatttctgacggacttttttctgaagcatctgctccagtgcctgctgataatcatccagctgccgcttgtaacgttttttcaaaatatctgcaccgtcttgttttgagacatggtcggtcttgtaatccaacagaatcagttccccattttcttcaaaataagcatctatgattccctgtatcaaaacagtttcttcactgtccacttccggatacagtgcggataccggcacacccataacaaactgcgcttcacgatataattcatgacgtctgtccgcctctgccattcgaaaccccagatttgaaaacaccatatcagcgatatcccgaatcctgatactttgcctctgctctccggataaacgccctgcggatgtcatcgcatttagctgactgcgcagccatgcttcatctctttcatcgggacgccccgcaaaatcgatcagttccagtgccctgtgataagctgtaccacggaaagccccgacattcgacacttcgtgtgtttcatccacttccttatccttcataaaatcaggcagcgcctcttctatttctgattgcttttcagacagggccatccccggtgccggttccgcttccatgattgcttccatggcatatttttttaattctgaaacagaatatttgcctttgactgataataatgctttctgaggatactgccatccttcttccccgaaaagtcgtttagaaacgtccgtctccgacacatcggacaaagtatgctttcgctgaagcagttcttctttctgccattttttatctataacgcgccccacttcacggccggcaagggcacggatatccaccattctgagcgtcacaacgttctcggcttctccgttcattacagccggcatgatccagtccagataagacctggcggatgtcagcatccagtcaggaaaaacttcacccaaaattccactgtttctctgccagatttcaagctttttgtcggtatttttcaggctctccatgccggtcataatcaatttttccttggctctggtcatagccacatataaaatcctctgctcctctgccagcgtttccagattcagtcgggccgcaataaatttcttataggcagacgtcatctttttgcgggtctgaagattgaccgcatccagcccgatgccgctctttgcatgcataaccagcttgctgatgctgtcctgaaaattaaattttttgcccagtccggccagaataacaatgggatattccagccctttactcttatgaatactcatgatccgtacacggcctttgtcattttcaggcatcaccgcctcaccgaaatcaatctggttctttttgagctgttcaatatatcgcataaagtcaaacaaactgctgtaactgccggccgcataagccactgcccgctcacgcagcagatcaagattggcctttcgcctttcgccccccggcaaagcctgaacataatcataatagcctgtccgatcatagatatagcggatcagctcatgcagttccagataaacagaagctcgccggatatcatgaaacatcgcaagaaactttttaagctttgctgctcccggtgtctcttcactgcatgccatacatgcgccaaacagactgccttctgaatgtttggaacggatcagagccatctcttccgaagaaataccggcgatcggcgaacacaaaaccgctgccagcgggatgtcctgccccggattatcgacaattgccaggaactgaagcattgtccgtatctccagcgtgtcaaaaaatccggcagacatttcagccgtggaaggaatattctctgaagccagcacatccacaaacttctcagcccatcctgtcaccgtccgaagaagtatgacaatatctttgtacccagctttcctgtaatctccaagcgcaccgtcataaatatccattccatgctcaggatctgtcatttcccggatcctgactgccgccagcttcgcctcaagctccacagaatccaggctctcatcatccggatccgtcgtctcaccgtctcccttcagaaacagaagttccgtattgtccgcaatatttttgccttttgcctccggaaatgccattcccggataaagagctgcctgatcatcatagtcaatcccgccgagactcttcttcatgatcttacggaaaatgtaattcacgccagaaagtacactttccctgcttcggaaattctgtgaaagatcaatacactgccttgttttctgactttctccaagagcataatggtgatatttttccataaaaatagctgcatccgccagtctaaaacgataaatgctctgtttcacatctcccaccataaaacgattatactgacctttgcgttctctggacaaaaggctgaggatcaattcctgtacctgattgctgtcctgatattcatcgcagacaacctcttcataaaattcactgagttcatctgcagcagatgtcggtttcacctgcatctgcccctgttcatcttctgaaaaatcagccagaagctgcagcatataatgttccaggtctgaaaaatccagcatattccggtcattctttaccgccataaactgctgtccgaaaacttctgtcaattcgatcagcatcctgaccgacgggcggatataagtcagctccgccttcagttcttcaaatgtgtgtacaaaatatccatccctaagcccttctatctctgatttgaaatccgcatgaatctccttcactttctctttaatcttcgggtcaacggacgccgccgttctcggcagacgtttccagacgatcttgtgcaaaatttctctgctgccgtcataatcttccgactcaccaagcatctgaaaccactttttatcatcctcgatcaccggaagataggcttccacaccattgggctcaagacagaatgcccgggcttcctcaaaaagcggcagatatttggtcagaacattattcagctgcatcatggcaaattctttcacctgatcggctccattatgctcttcatctgtcgaataagccgccagacaatgcttcagccaatattccggccatggaaatcctcttgaataatcatacagcgcaatgatcatttctgcaattccctggtcggtcttgccattggcatagcgatccacaaaagctctgaaggccctgttttctgatgcataataagtctccatcacatcctctgccacatcggatttcaaaagcttcagttcagcttcatctcccaatctgaaggacggatccagatccagtacttcaaaatgttcacggattgtcttcaggcagagactgtgaatggttgagatctgggcacagggcaataaaagcttctgccggatccatgctgtgtgatccggttcttcaagcaatttctgatccaaccctctgccaatacgttcacgcatttccgctgcagccgcattggtaaatgtcaccacaagcaagcgctcaatatccaccgggtgcttttcatccgtcagtaatcggatcaatctttccacaaggactgcggttttgcctgaaccggctgccgctgatacaagcacagaacagccccttgcatcaatgaccgcctgctgtttttcactccactgaatactcattctcccgcctcctttctgattgcttcccagatctcgtctttattcatttttttcaggcgcttccagtcaaatccatcaaaggccggatcaaaaccgcataccgacttaaagctgcagtaatcacaggccttttgtgttccgtaccgataaggatgtacggaaatatcacctgaaaaaatcttttcccctaatcgctttgttgtccgcttcacatgccatgaaagcacttcaaaattctccggtgctgctgcactggataatgcagacaatgtcccgtctttttttatcttgaccggaagaactttcggcggctcctccgggtgatgatccatatgtcgaacagcatcgtcatcatccagcacaagaccatccaccgccagctgttcaagaattgaaagcacatcctctgcagcaccggatgaatccgaataattttcattctgctcatctgaaccgacaggctggttgcccgcaaaatcccgaaaactgtctgatgtcacaaaaggatcatcaatgtgataatacagaattcccgccggaataacgatgcattgtttctttttctgctgctgttcctcacgtgccgcattcatatagaccatcagctgcagctgcagaccatgaaagaccgatgccagatcgaactttgtacgtccggacttgtaatctataatcttcagataaactttgtcatcttcctcacacagatccattcggtcaatcttgccatttaaagacatgatgccccgatccccgtaagacaaatgcatctgctgattctcaagttccgtcgtaaaacggacttcatatccgaccggctcaaaatcccccttcttcaattgctgttgcagtgcccagatggttcgtttggtcatgcgcatgattttctcagtcagataattggcacgcatactgtcctgcatcacagaatgattatattccagtacaacgctgctgacacattcttccaccagatgatccctgatctcatccgaaattgtccgccactgatagccgctccgtccgattctcagtgaaaaacgttcgattgcctgatgaaagatcatgccaatatccggcgcctgtacctgataaattttcctttcttttaaatggagtccataagaaagaaaatgggcataggcacaggctgcatatttctccagcatcgtcacaccgcccgtcagctgcccgccgtaaacggccctgacagccgcctgagacaactgctcatcccaatgcctgtaaaatgctgcttccaccagctgtctggtcttctctgcatactccggccttgacataaaccagtcatagacgtccagccagtcttcgggaatctgtccattctcactgatctcacgaagccctctgatcatatactgataactgtggatcaaatctcctttttccgtatccgtctggtgtacccgttccagtaccagcttcggaaaaaccgctttgatcctgtcaaaaatagaggacggccgcttctctttccctgctgcatcctgctcagaacaggtcagtatcagcttttcagaaggttttgtcatattcatataaagataatactgctctgtacatgtattttcctttgccgttggtgccaaatgaatgtgatgcaatgccagacggtctctctcaatttctgtcagcagaccgccgccgttttccataagcggtaccagtccatcattcatgccgacaaaaaacagaactttaatgttctccagccttgttcggcgtatatcaccaaaggttatctgatccactcccggcggaataataccaatccgcacatcattgacgccggcatccagcacatcggaaaagacctgaatagaaagtggctcctgaccgagaatcaagtacattctctccagcaattcgatcatcacatcgtaaatctgctcatattccttggctcttgaaagatccccgtttttctcaaagaacgcagtccatgcctccagctgtcctcgaatgcccagctgctgcatatacaaataaagtctccgcataaaatcgacggtccggctttccttattccggcttacttcataaagtgcttccaagggcaggatcagccgttcccggatgccattgatcctgtccagctcttcatcggtcattccctgcattttggccgtccacacctttgtccacttactatggccgcggatgcccagcgccagcacataatcctccagacagtccgtctcctcctctgaaatacccgtaaggccgcttctgagataccgcagcatagacgcataactgtatttttgaaggaaaacactgcagagtgaccgcagccattcaaccagcatatttcccgaaatgttgcgtctgccgtcaaagaaacaaggaatctgatacttatcaaaccaataatcagcactgctgcggtacagattcatgtcactggctacaacagccatatccctgtatctgtaatgctttctggctgcatattcatgaatcttcatcgccacaaaacccatctcatcattcggtgatgtcagcctgaaagccatcagatcctccggcttttctgcccgggccgcagccctttttctgaatagattcttctccatggcagccagttccggatgttcggcaaaccgcccattttcattgccttcaagatgtatgtccgcttctctggacacctgatgctcacggcagatccgctccagctgaaaaatcgtatccttcggcaggtaaaaaaggtgctccatggaaacggtctgatacggattctccgaaacatccacattcagcgtcatcactaccctcggtgccaactgcagaatccggttcatcagacggtactgaatgggtgtaaaaccggtaaaatcatccagaaatacgtgcacacggcgaatcatatcggattgttcgatcacatcgcataaccgatccggcacttcctccgttgtcatatatttttcatggattctgtcaagaaaagcctcataaatcactgttatatcctgcaatttggcatataaaacagactcagtccccatttccatgcttcgctttctgagaatatccggcgtcacgccgtactgtaaaagctccgacagcatagacttcacttcgtccacaaaaccctttttgcgtatattgcctctgaaggcagaaagttcttcttcatgctccgtcaaaattcttcggataatcatactcttgccggtatcttcgagaatttccttctgattcagccccagctcctcaaagatcctataggccagacgttcaaaactcagtacatctacattcatcacaccatgccgcggatgatgcataacaatattcttctgtgcctgcatggtcttctgttccggcacgatcaacagcgtcttttcatcaggaaactgtaccgatctttcgacaatcatctgatacagtctggtggatttgcccgttccgctgcctcccaggatcaattgtagtgacattctgttctcctctcatatttaacatcagtttttcatatacatatattaacatttttacggagggatttccatgcaaagtgatacccgcatttttgttttcaggctccggcagcttttaacatttcttctcgtcctcattattcttattgcagccgctgtttttatccttttcgtcatcggctcaagcaaaaaagatgtgcaaacatccccggcttctgcttataccgcaggtgtttacacatcttcaattacactgaacaatcaatcggttgatatccaggttgttgttgacaaagatcacatcaaatccgcttccattgtcaatctggatgaatctgttgcggccatgtatccgctgctgacaaccagtatggatgccatctccgcgcagctggccgccggcgtctccatcgatgatatccgttacgaatcgtccagccgctatacttcacaggtacttctcagtgccatcgcccaggcgatcgacaaggcccgctgaccgtttgccgtctactcgacaatctcatccagttcctgcatccagagtgtcacgcaggcatcactcggcatacgcagatcccctcttggagaaaccgcaacagaacccaccttcggaccatccggcaggcatgagcgcttaaactgctgtgcaaagaaccggcgataaaaagtcttcagccatctgagaatcgtggcggcatcataaacgccttcaaaagctttcagggccaggcgatataccttggccggatgccgtccgaaacgaagaatatgatacaggaagaaatcgtgcagttcatacggtcccaccagatcttcggttttctgtgaaatctgaccgtcctccggaggaatcaattccgggctcaccggtgtatccagaatatccagcaatgtctcctttaatgtctgactgtccgctgtgtccgcacaatatctgacaagatgacgcaccaaagtctttggtaccgatgcattgacgccatacatagacatgtgatcaccgttataggtcgcccatcccagcgccagctccgacatatctcccgtaccaatgaccataccaccgagacgattggcaatgtccatcagcacctgagtccgttctcttgcctgaccattctcataggtcacatcatgattggccggatcctgtccgatatctgaaaagtgcagcgtcactgcttctttgatatccacttcctcaagggttgctccaagtcttcgaaccagttcacaggcattgtgatacgttctgtctgtcgtaccaaaacacggcattgtcacagccatgatctgacttctgtccatatccagcatgtcaaaggcacgtacagtcacaagcagcgccaatgtggaatccagaccgcctgaaatgcctacaaccgcatgtctgcagtgtgtatgtgccagacgcttcttcaatcccatcgcctgaattgtcagaatttcttcacatcgtctcgttctgtccatggcatcatccggcacaaacggatgtggatcaatgaaacgtcttaaatccacttcatgcagttcaagatcaaaatcaatcacacggtaaccattgtcaaacttcggctgccatgtggtcattctgcgtcgttcgctgatcagcttggacatatccatatctgccatgatcatctgattgctgaaacgttcagattctgccagaatgctgccgttttcgcagatcagattgtgcgcgccaaacacaaggtctgttgaagattcaccctcaccggcatctgcataaatatagccgcagacaagtcgtgcagactgtccgcttacaagggatctgcgatagatatccttgcctgttgtctcatcactggctgacagattggcgatcaccgtcgcccctgccagtgcatggctgatgcttggcggctgtgcaacccagagatcctcgcagatttctataccaagggtaaaagccggcatctgacggcatctgaacaaaagtctggtaccaaatggatacgttcttccattaaataaaacatccgtctcaatatccgcaccgctgtgataatggcgtccttcataaaattctgagtacgtaggcagataagacttcggtacaaatccaagtatatcgccatcatgaagcactgcagcgacattgtaaaggacaccattcaccgtcagcggcagaccggctaatacaaccatattcttgtctcttgtagcctctgtcagtgtaagcagtgccttttctgcaccatccaacaggctttcctgcaggaaaagatcactgcatgtatatcctgtcaggcataattcaggcagtacaagcagactgacgccctgctcataggcctcggacacaagtgctaccgcagatgcgccgttaaaattacagtccgccacccggatatccggagtggccgctgcaacgcgtaaaaatccgtcaaacatacgaatgttgcctccaaatttatcgttatagtcagcgtttttctctgagaaggcctcttcggtaagcatccagcagctgttccagatcaacgatgtctttgcggatctgcttgccgacatcggtatctgcaaccagccggcgttcattgaccagctgaacaactgtaatattggaatggatatcggtctcttcgataatcgccttttcaagactttcaaatggttcatgggtaacaagtcgaagtccgtaggaattgtagatcagcgtatagcctgcaatacccgttgtcttctgataagcctttgaaaatcctccgtcaatgatcagcagcttgccgttgcccttgatcgggctttcccccttcttgaacttcaccggcatatggccattgacaatatgacaccgcttcggatccataccgaattccctgagaatcatatcacagatatcttctctctcgatcagtttataataataatccttacgttcttccttcaatgatggttcattgataaaatatcgctcaaatgtggccattttctccttgccgaaaacaggtgaatcctcattggaccagatgaaccacataatatcctgaccgtacagcctctcttccggatcactgctcatataatagccctttcttgcgcagctctcaagaaaatcatataaagctttaccggaatacttcttgcccttcaatgttacatctctgaatgtgccgtcttcattgaacggaacacagccatgataatacagattgtcattgtagcaaagataaaggctgccctgcttgaagaagaactggatatgcttctgaagcttctcacaccccttaaaggcattcacaagacggttcataatatcttcttcttccggtgaaagcgcatacggatccttcggatcaatggtcgggaagttatgatcaagcagatcatattccttgccgtctatggttatactgcccttttcatagttaatcttatccagtaaaagtctgtccgccatatggaattccggtcggcgcatcatcagctgcccttccagtttgaactggatgattgcaatggccttatgcatcttaacttccacttcttcttccacctgactgatgctgtaatcctccctctccacatgcttaatcgcaaacagtgaacaaggatcatctccataaaccgtattggcaaaattcgccagaggcatcagattgataccgtaatcatcttccaatgtattcagattgccgtaacgggcactgatacggataacattggcgatgcaggccggatgtccgctggctgcacccatccagagcacatcatggttgccccattgaatatccacagaatggtaggacatcagtctgtccatgatggcagctgctcccggacctctgtcaaaaacatcccccacgatatgcagatgatccacaacaagacgctggatcagattgcacatagccacaatgaattccttagcacgattaatgcggatgatcgtattgatgatctcattgtagtatgcctctttattcaggatatcttctctctcgtaaagaagttcttctatgatataggcgaagtctttcggcagtgcctttctgacttttgaccgtgtatacttagactgtgaacgcttgcagacgcggatcaggcgatgaaaggtcattctgtaaaaatcctcaatatcgtcctcttccttctctataagctccagcttcttctccgggtaatagatcaatgttgcaagctgcttcttgtccttcatactgatgctgttgccgaactcttcatcgatcttggctctgactgcccctgaaccattcttcagcacatggaaaaactgatcggcttctccatgaatatcactgagagcatgctccgttcctttcggcaggttcataatggcagacaggttgataatctccgttgatgccgacgcaatggtcggatacttctcagataaaagtttcagataacgcttctgtaaatcgtccatctgttccatagcggctcctttccgtttttctattctgctaaccaatgacatcgctcatctgatacatgcccggcttctttcccttcaaaaactgtgcagcctgaatcgcacccttgccgaaaatagcctttgaataagccgtatgcttaatctcgatcacttcatccggaccacagaaaaggacttcatgctcgccgacaattgtaccgcctctgacagcctggataccgatctcattggcctctcttctggcacgttctgctgaacgatccagtttgtatgtatagcgatcatccatagcctcattgatcgcatctgcaatcgccagtgctgttccggacggtgcatccatcttcttgttgtgatgcttctcaacaatctcaatgtcataaccgacttcaccgagaatctttgcagctgccgctgccagcttgaaaactgtattcacacccagtgacatattggcagaacgcagaatcgggatctgtgctgaagcagtcttcacatcctccagctgtttctcacccagacctgttgtacaaaggaccagcggcatcttacgcttcaatgcataagccagaaccccatctacagcctgtgcaacagagaagtcaacaatcacatccgcttccacatcacatgcatcacaagatgtaaataccggatatggattctctctgctatccacacggtcaatacctgctgtgatctctgcatccttgtcttccgctgccagctttgtgatcacctgacccatggcgccgttgcagccatgcataattatctttaccatctctgtatcctccatttgattgattctattcatatataaatattcattggtaactgttcattgcccgattgtcttctcttttacagtcttctgacaatgcactactttcattttaccctacatcgggccataacgcaattatagttaaagtattgacattctcataacctgctttttgaaattttgctcggctctgaacagttacaagtttttaatacacaaagaaagactttcccggatacacaatacgctgtgcatccgaaaaagtctccagaaaaatctgtttcttattctgccagtttcagaccataagccttcatggctgcagcaagacgtgccttatgttcaggctcaatctcggataaaggcattctgagcggtccgacattcatgccaagcagattcattgccgctttaacggggatcggattcacttcgttgaataattcatgcatcaaaggcaatgcctttaactgcatttcaagacttcccttcacatcccctgccagatacctggcaacaatatcatgagaatctctcgggcaaatattcgaaaatacggaaatcacgccgataccgccaagggacaggatcggaacaacttcatcatcattacctgaatataaatcaatacatccgtctgccagctgcatcagtgtggcaatctgggaaatattgccgctggcttccttgatgccgacaatattgtcacatgtctttgccagtgtcacagctgtctcaggggcaatattcacacctgtacgactctgtacattatacagaatgatcggcatatctgtatgctttgcaatctctgtgtaatgtgccacaaggcctttctgtgttgctttattataataaggtgtcacaaccagtgcaccgtctgcgcctgcctcttcagcctctttcgtcagatagatggctgtctctgtactgttggaacctgtacctgcaataacaggaattctgcctgctgtacggctgatagctgtacggatacattcaatatgttcttcctctgacaatgtggaagactcaccggttgtaccacagataacaatactgtctgtgccattctcaatctgataatcaatggtctcttcaagtttctcaaaattaactgaaccgtctgcatgcattggtgtaacgattgcaacacctgcacctttaaaaattgccatatctctttcctccaattttattactgccataaaggggacatgtacttccgctcttttttgtgcaaggctcagagccttccaatgaaacagaccatggcataaaaaagagccgacgcaatgccgactcataagaataatctcaactatgaaaattcttcaagcagcactccatcaaaatgatgacagtcatacagctcttaactgtatgcccagcaatatatcttccaggaaatataaagcttcggcatatcatcctttccaacccattcatctgcacctgactgcatcctgagttctacttatataaatatgcgcctctacttaattactgtttcatagtatcaccaaatacccctcatgtcaacagaaaagctacatacatgacggtttttcagagcaggcacctttcacaatgtccagccttgaaatataatccgcatacggaatcagttcttccggaaggtgacggcctgtcatgatcaattccacagactcatctttcatgtcgatcagacggatcacatcttcacaggtaataatcccaagatcaacaagtcccagaatctcatccaggatcaatacatcacattctccaatggataatactttctttgcaaaattatagccattgagaatattgaccttctcctcctgcttctcctcatcactcagatcttcataaaaagcttcttctctttcgaacctgaaaaccttgatctccggctccagtctcttcaggtaatccaaactgccggtcatcttacccttcagaaactgtataacaaaaacttctttctcctcgcctgcgcagacaagtgcacgccccatcgaagaggtggatttgcctttgccttcaccaaagtaaatctttactaaacctttttccacaacatttacctctgattcttataatgaatctctctatcctctcacatcgtgaattataaaacagtatgtaactgttcagagccaaataaaatttaggttggctctgaacagttacaacaatatatagtaaatatcacattcccgggaaaacgtcaagcaaaaactaccgttctgatgcctttagtctgcatattgacctttattctacacattcaattttgctgacggaaatctcataggccgtccgcttttccactacatcattatccagccgtttctgatatgtacggctctgaatccttccccagagatggatatgtgttcccacttcaaatttgccggcaaaccgtgcatttcttccccagcagatacacggcagataatccgacttgccatacggcctgttgacagccatcaaaaggtctgcgatctcacgtccaagaggtgtcatccgatataccggcggtttgcagatatagccatccagataaatgctgttcggctttgtcagcgttccttcttcccccacaaatgcaaactcccggacaaataccgaaagaatcagacgatttctgctttcttcatgcttattataagaacggaactgtccgtgtacttccacgatcttccccctgcagctctccttcacatccacaagccgctcagaaaccatcaaaggaatccgatcctccatatgactcagacggttgacaaccacctccagcatataaaagccttctccaaaaacttcatggctgtatgtgaattccgaatcaaccgttccaacgattgtcacctgattgttatccattgctttatctgccatcttttaatcccctttcaccactccggtaaatataagttttttaatatgtatttatatgtattctgtccacatccgatttatgctatctctttttcatgaacggatatgctctcatcacgcctcttttgtctgaatcaaactgtcatgtgacaattacaaatctaccatgatttaccatgaaaagaaattctcattcatcgacagattcttccatataatggcatttgcagggggccatcggtcatttttcggccttttgaatgcatttattccgttttattatagatttccgcaataaaaaacttgaaaaaccttttcgtaattgatatgataaatagcgttgttaagcagattctttttcagaaagaaggatttatatgaatataaagagagaagatacaagaaatattgccatcatcgctcacgttgaccacggtaaaacgactctggtagacgaacttttgaaacagagcggtgttttcagaagcaatcaggttgtacaggaaagagttatggactccaatgatatcgaacgtgaacgtggtatcaccattctttccaagaatacagcagttttttataaggatgtcaagatcaacatcatcgatacaccgggacatgccgatttcggcggcgaggtagaacgtgtccttaaaatggtagacggcgttgtcctcgttgtagatgctttcgaaggcccaatgcctcagacaaagtttgttctgaagaaagcccttgaactgaacctggctgttatcgtatgtatcaacaagatcgaccgtcctgaagcaagaccggacgaagttattgacgaagttctggaactgctcatcgatcttgatgccagtgaagaacagttagactgcccatttgtgtacgcttctgccaaggaaggtgtggctatgcttgagatcggtgatgacagcaacagcatgcagccattatttgagacgatcatcaaccacattcctgctccggaaggtgatcctgacaagggcacacaggtactgatcagtaccattgattataatgaatatgttggccgtatcggtgtcggcaaggtcagcaacggttctatccgtgtgaatgaagatgctatcatcgtcaatgcccacgaccctgaaaagcgtcgcaaggtgaaagtcagcaagctctatgagtttgacggtctgaacaaagtggaagttgagaaagcaggcgtcggttccatcgtcgctatttccggtatttccgatattcatatcggtgatacactctgctcccctgattttgtagagccaatcccattccagaagatttccgagcctacaatttccatgaacttccttgtcaacgacagcccattagccggccgcgaaggcaagttcgtaacatcccgacaccttcgtgaacgtctctacaaagagctgaataccgatgtcagcctccgtgttgaagatacagagaacacagactgcttcaaagtttccggccgtggtgaactgcatctttccgttctcatcgagaatatgcgtcgtgaaggctatgaatttgcagtcagcaaggcagaagttatttaccacaaggatgagaaaggtcatcttcttgagccaatggaacaggctgtcatcgatgtaccagatgaattctccggtattgttatcgagaagctgagcttccgtaaaggcgaactgcagggtatgtcccgttccaacggcggttacactcgtcttgagttcctgatcccatcccgtggcctcattggttatcgtggtgaattcatgacagatacaaagggtaatggtatcctgaatactatttttgacagctatggcccatacaagggtgacattgcttaccgtcagacaggttccctgatcgcatttgaagccggggaaaccatcacttacggtctgttcaatgcacaggaacgtggtacactgttcctcggacctggcgaacaggtttaccagggtatggtcgttggtgaaaaccctaaaggcggcgatatcgagctgaatgtctgcaaacgtaaacagatgaccaacacccgtgcttcaggttccgatgaagccttaaagcttgtaccacataaggtactgagccttgagcaagcccttgacttcatcgaaaatgatgaacttgttgaggttacaccaaagaatattcgtatccgtaagaagattctggatccgaaacagcgtatgcgtgcgaacaaaaaataaaaataaataatttttggtgtggtccaccaaagtactcataaagagattaaaaaagagcaattcaacacaggccgttctcactgccaacgccagtaatggtacataaggcattaaaaggcaatgcctaagtaccaacaggcgttgaagcacctgtgtgtgaatatactctttttttaatctctttttcaatgtattctggaccgcatcctaattgattttactaacgaatattgttcgctcttttgcattctgattcatctatcgctttagtctgttgttatttttatggtcagagcagaggctttccagttggagttgtcggactgcattttcacgtatcctgttgcggtgccgactggctgtttatcatcggaggtgactaattgtgtgctgaagtcgtaagcattatcttctcctgattttgctgtcaactgtatatcctgcgcaatgatatctttatccagcttttgtgccagtttcatcggagctatcattgaacggtctgccaacaaatctgcgatgcaatcagctgtcattatctctccaaattgtttctgaaaatactcttccattccgtctatcgataccattccggtctcatcgccggtctcggcagatgctatctctgcatactggctgtcaaattcatcggcatcctgcaccgtaccgcttaaaaattgattaagcacagcgttggcgctttcttcagaactgttaccactcttctggcaacctgccgccaacagcatagccatcaatactgccatgcatgcgaaaattcttccaagacattttaacttcatcctatcatctcctcctgttcttaaatcgcgtgaatctttgtgctttttagaaatattttctaattacaagttatcatacgtgaattattctgtcaatgcaaatcagcctataaaaaagagcgagcaaattctagtgcgttccacccaaatacttattaaagagataaaaaagagcatattcaacacaggccgttcccactgccaacgccagtagtggtacataaggcattaaaaaacaatgcctaagtaccaacaggcgttgaagcacctgtgtgtgaatatactcttttttatctctttttcagaatattctggaccgcatcctagtttttctgaaccacatcctaattattctctgaataattaaatagagaaatagtatctgcttttcatttagtctgttgctatttttatggtcagagcagaggctttccagttggagttgtcggactgcattttcacgtaccctgcagcagttccaaccgactttttatcgtcagatgtcactaattgtgcagtgaaatcgtaggcatcgtcctctcctgattttgctgtcagctgtatgtcctgcgcaatgatatctttatccagctgttgtgccagtttcatcggtgcaatcattgaacggtcggccaacaagtctgcgatgcaatcatctgtcataattttcccaaattgtttctgaaaatagtcatccattccggccactgatatcatctcagtctcatcaccggtttccgcagatgttatctctgcatactggctgtcaaattcattggcatcctgcactgtaccacttaaaaattgattaattacagcggtggcgctttcttcggaactgccgctgcttttcctgcagcctgctgccatcatcacaaccaccaacaatataacaccaacatatatatttttaagacactttaatctcatatatttcctttctactacaatatatttgataatgattaaattaagggcagttaccaataaaataaccgcccataattattacttcaatacaaaattatccaacttatgaacattaatatctaaaagatataccaggaattgttgactttgatgtataccaaatatttttccctgactgacgaattacagtcacatatgaggtcaacttttcgtgtggctgccatgtagtgtaatagcctaatgcttttcctgttcccggctcaccctgagtaactataactaaatagcattttgaacactgagaacaacttccattgtttacaacagtcttccctgtatcaacatttacaatgtctccccaaccttttgctcgcatatcatgcgaaccacttccgcattcagcaattgctcgacttgtaagtaattgtcctggttcaccgctattttccacgtctacaccatatacatgtgcttcattgctatctgaagccgcatcattcgtagctgcaaatacatttgccgtaaataaggacatgcacagtacacaactaaccatcgccataaatcttttaaattttccgtttttcatttgaaatcccctttctgaaatacattatcttttatctacacccccacacaaatcaccttgccatcagaatcacctttttccttttagttaacaaagcaaacatatctatttgaaatatctatttttgatttgttatttgtaattttctgattacatcatactgcatttttatttttttgtcaagagtattcttcattgaatagtattgctttttatttaatattttgttatcatacaaatgaaaggagtttgtatggaccatagcgaatctcccattattttaagattaaaaaaagccactacagagcttcttcttttaagtcttcttagcgaagaagatatgtatggctaccagttggcttctgaaataaagcaaagaagccatgaattgtgtgcctgtaaagagacatctctttaccctatattaaatcgtcttcttgagaaagaccttgtttcaacatctaatgttgtaactgaaaaaaagaaaattcgtgtttactaccatctttccgaaacaggcaaagaatattacgaagacatgaagaaaaattatgctgcctatattaccactgtcaatgcctttttaaaattggaggtctgaaaatggaagtaccatcatccatcacagataaagaaattcataattatctttcagaaattaaacatcagctcacttttacacactctccaaaagagacagcttctattatgcaaatgatagaaagcagtatcgatgactttctcagtgaacatccttctgccacaatcaatgatttaaccaatcattttggttccactgatgaattcaaagaaatgtttatttcctgtgccgaatcggaacaacttgaaaatcatttaaataattcacacacgaagcgaaaatatattaaaatctttttgttcgtcgttgcacttattttacttatatatattggcattagaataaaattctatatagatttggcacaagaaattccagcatatgaagttatcagaatcgaataattccaggaggattagcttatgaaaaaaatattcatttttatacttgcctttttaatgtcattcaataccatttgctcattgcctgtatttgcaaataccattaatggcggctctacaactgagtacactttctatgatgacggtagttacatggtaacacgcattactgaagaaccaaatgctattactactcgttcctcatctactaccactaaatcaaaaatttccagttactattcaaataacaatgtagaactctggtatgtaaaagtcactggcacgtttacatataatggaacctcatcgaaatgtactgattctcgcgtcacggctgcatcttatagtagcgcttggaaaataagtaataaatcagcgagtaaatccggttcttctgccacagctaaagcaactgccaatttttatgttggttcacgtatagaaaaaacaattaacaaatctgtcaccttaacttgcagcgccaaaggtactttttcttaatctattttatagcctttaacacaaaaatgaaggaatatcctgtatcctacagtcttccttcatttttgttttttactatcctattttattttacgccactgcattcccatgtttctgtatccagcagcagaaattcttctgttccaataggcttgccgtcacggtaagttgaaaagacatcacaggaaatcaggtttccttcttttgtaatcatatccatcggtgtatggcccactatctgcaatagtttccgcggcttatacaaccgcatattggaatgctggggtctgagccagataggcgaggcatcgttccacatttcgtttggaccgagttcgttaatggccgccaccactgcctccacgtcatgatattttgctttcggtacaacgctctctgcaaaataatccaatacccccgcatgggaaaataacacgttatctattttctggacatagcgaatcggattgctctccgggagtgcatcccgcaaatccaataattttctctgcacagtgtaagctgccattgaactgtagccactttctatgcgatgccagagatagctcaggtcatgattgccataacaccaggctgtctccggaaattctttggcaaaatcaatagctgcatcataggtttgttcatacagtgcaatatcatactctttcccccagtcatccggaatatccatcagacacactgcacggtccgcctgttttgcacgcataagcactgctgcctgttcaaacatccacggtttcaaatgcacatccggtattactaaaactttcatcgaatcaccctttcttctcatctgttatcattataaactctaccaaataaaaacttgtcccctgctaacaaaaaagacatataaagtctaactttttggcgacacctaagttcactttatatgtctctttgaaattgtcattttcctcaatcaccgattattcaaaaatctgtttcaactgaatagatgtcggtgacggcatcttcaatggcgcaccgctcatcataatatagcctttgtcgtagttgactttgaaggatgtcatggaattgccttcctgattgacagacacaaacatctgatctcccggcataatcgccaggtctcttggatattcaccactgaccggaagaatacataatgtcttcatcatctgatcttcttcattaatttcatagattgctacagaattgttgccggagttggtaacaaaaagatatctgtcgtccggagtcaatttcaacgtaatggcactgttgtagttatcatacttctcaggcagtgtagaaattgtctgaagctttgtaaaatgagcagtctcagcatcataggcatacttcgtcacgcagcatttattctcatgggtcagataagcataacgaccatccgatgtaaagatcatatgcttcggtccggattccaattcgcatctcagaatatcatggagcttgatcttgcctgtttcatgatcaaactcatacacctttacctgatccataccaaggtcaacggccataatgaaacgttcatccggtgagaaaatcgcacaattcacatgacagcgataattccttccggcaatactgccaagacctttcataaagacttcatccgtcacgccctgaatcgtaccatcctcatttaatcttaaaacagtcaacttgccatcatgatagcctgctgtcaacagatagcggttggctctgtccacagacagataacaaggcctcagaccattcacagaagctttgttcatcaattcaagaccgccgtccggcaaaatcttaaaagaagccacgccctcatcacaattgctgtacaaatactgttcgtcatgggataatctcagaaatgaaggattgttgatcttaaatgagtcccttaccttaaagtatgcatactccacattcgcatccagaatataaataccgtcactctcgcctcttgtataagaacccacatatgctacatatttatctgccattctaaaaactcctctcaaagtcatctgccattcaaagctgaacccctttatttttcaaagaagaaattcaattatcaattcaaaacaggcacacttaccgctattttctaaacgtaagtgtaccatattccatcccagatgtccacaataacccaagttaaaacattgacgtccgtccctatttgtagtaatctcatactgatgttattcatcaaccacattatcttatttttagaattatactcaacgcgaaatgctctgtattcttagatagttgccaatcattcatcattcaaaagcaggtgcttctgatgtggccggtacttaggcactgtcctttagtgccttatgtaccgctgccaacatcagaccgtgcgaaggtgtctgctttgaatgatgaatgattggcaacttcaaaaaaacatctgcgtttcgcccattaaggaggattttactatggagaaaattgccagtttcacaattgaccatttaaaacttgttcccggtgtttatgtttcccgtaaggataccattggcaaagaagtcatcacaacttttgacctgcgcatgaccagtcctaatgatgaacctgtaatgaacacggccgaagtacacaccattgaacatctggctgctacttttttacgcaaccatccggtttacggtgataaaaccatttactttggaccaatgggctgccgcacaggcttttacctgctgctggccggtgacctgacttccaaagagattgtgccgctgatgattgagatgtttgaattcatcagagacttcaaagacgaagtgccaggcgcaagtccgaaggactgcggcaattatctggatatgaacctgccaatggccaactatctggccaaacgctatcttgacaatgtactgtacaatattgatgacagcagactggtttatccggaataaaaatcgacataaaaacaaaaatctgcggcatactatcacaaaacccaatcgtccaaggaggtttacttatgatagaaccgcagatttcttttcatccggatcactattttcaaaaagccgaatcccttacgatgccgcagcctgacatcaccaacagtaccgacggttcagaccggatgaccgtccgtgatgaccatcttccgccctacatcggcgattttccgccgaaatcttcttcaccctcacaggatgaaaagatggtataaagccgcaattaaaagcagatgggtcggataaaagatataaaaaccatactgcatcactttcgtctgccggcccctctgcccattataaagcaggattgggatcagggccagcaccgcataaacttcaacaccgcccatagcagccagaagaatcgccgcaatgggatattttaactgaggctgcccccgcagataataaaaaatacagataaccgcaatcccagtaaaaccataatccgtattgaaaaattcagcgatcagccccgctgcaataataacaagcaatttatagagtacatccggaatgtccagctgctcaatggggtgctcaaggaaccagatagccagaagtcccagtcccagggtaaaaaatacattctgatgacccgtatataccaaccggtgataaaaagccaggtcaaaagggacctccgaaatcaatgcaaaaatacccatacgcagaatatatttcttcatgttacgggtatgcacagccccttccaccagcaaaaaacagtagattggaaaggctaatcgtccgataatgcgaaatcccatcatcccgctgaaacaaaccgctcccagatgatcaatgaacatagacagacaggcgatcaatttcagtactgtgccgtccagtcgctgataccgggatatattgaccgaaggattcatttattttcctccctgtttctgagcttcaatccgctctgccagatcattgagatacacccagcgatccatcttctcttcaagggctgactcattcgcatccttttccttcatcaggtcattgagttttccggaatccgtggcaaacttcatcatatccgcatcaatctgttcaatcttcgcttcaagggctgcaatgtcatcatcaatggtatcaaattccttctgctcgctgaatgtaaactttaatttcaccggtctgttctgcttccagtctttggaattgttcttcttttccccgctgtcagcttttgtcttattggtcagactcatatccggtgctgtgccaaaacgcttctcatgggcttccagataatcggtataaccgccctcatactgtcgaatgtggccctgtccgtcaaattccagaatacgatccgccacattatcaaggaaatagcggtcatgggaaacagccacgacaatgcctacaaatgaattcaaataatcctccaggattgtcatggtcggaatatccagattgttagaggcctcatctaacagaaggacattgatattctgacataaaacaccaagcagatacagacggcgcttctcaccgccggataatttgccgattggcgcatactgcatttccggtgtaaaaagaaatcgctccaacatctgggatgcactgatcctgccgtcgcgggtaataatatattctccgatgtctttgacataatcaataacccgctggcggtcatccatttccttctcatcctgggcaaaatagcccatacggatggtctcgccaatctcaatgacaccggaatccggcgccacctgtcccaccagcatcttcatcagtgtggatttgccgcagccgttcggaccgatgatgcctaccttttgatttctcaggaaaatataactgtaatcatccagaatgactttatcaccataacgcttgctcagatgctgcagttcaatggtctttttacccatacgtgtctcaatggaatccatctccacaacctgtgcctgctccggtgccgttccgttcttcagcgcctctaaccgttccagtctggcacgctgtttggtggttctggcacggcatcctctcttggcccattccagttccattctaaggacactctgacgcttgcgctccgttgccaattccatctcttctctggctgcctttaattcaaggaaaccggaatagttggattcatagctgtagatcttgccctggctgatctccaggatcttgttcgtcacctggtcaaggaaatatcggtcatgggtcaccatcagaatcgttcccctgaaattcttcaggtaatcttccagccaccggatcatggcactgtccaaatggttagtgggctcatccaaaagcagcacatcaaaatcctgtgccagcaccttagccagagccacttttcgcttctggccaccggagagctgatcaatgggcatactgtaatccataatccccaactgacttaagttgctctgaaccttccatcctgtctcgtcatctcctgcataagaaagaatcgtcgcattctccgggaacttcggctcctgaggcagccatgccagtttcagctgattctgccggataatattgccggaatccggcacttcatcgcctgcgatcattcgaagcagcgtggatttgccggtgccattgatgcccacaataccgatcttgtcaccttcctgaataccaatggacgcatcatcgaaaatcgtcttctcaccaaaaattttgcttatatgttcaatattcattatattcataaaaaatacctctatctattttatctttaataatgataaatgaaatttacataaccgtcaattgtattttccattgaaaaggcttgcaaattagctaaaatacggtacaatagggattgcagtctaaattattaaaaattggcgtaactgctgaatgatatgtacacaaacagaaaggtttatctatgattagtgcaaataatgttactctgcgcattggcaaacgcgcactctttgaagatgtgaatattaagtttaccgaaggcaattgctatggtctgattggcgccaacggtgccggaaagtctactttcctgaagattctctccggtgtcatcgaaccgagcaagggcgacatcgcaatcacacctggccagcgtttatccgtactggaacaggaccattataaatatgatgattatcaggtattagataccgttatcctgggcaataagcgcctctatgagattatgaaagaaaaagacgctatttatgccaaagaagattttacagatgaagacggtgttcgtgccagcgaactcgaaggtgaatttgccgacttaaacggctgggaagctgaaagtgatgctgcgacgctgttaaatggtctcggtatcgacacagatcttcactatgcttatatgcgtgaactggacggcggtcagaaggtcaaggttcttcttgccaaagccctgtttggcaatccggacattctgctcttagacgagccgaccaaccacttggatctggatgccatcgcatggcttgaagagttcctgatcaactttaacaataccgttatcgttgtctcccatgaccgttatttcctgaacaaagtctgtacccatatcgctgatattgattatgccaaaatccagctttactctggcaactacgatttctggtatgaatccagtcagctgatgatcaaacagatgaaggaagccaacaaaaagaaagaagaaaagatcaaggaactgcaggaattcatccagcgtttctccgccaacgcttccaaatccaagcaggcaacgtccagaaaacgtgcccttgagaaaatccagctggatgagatccgtccatccagccgtaagtatccatatatcgacttcaagccaaaccgtgagattggcaacgaagtacttcacgttgaaggcatttccaagaccattgacggtgtgaagctccttgacaatatctctttcaccctgggccatgatgataaagtagcttttgtcggcccgaacgtcaacgccacaaccgcgcttttcaagattctggccggtgaaatggaaccggatgagggttcttataagtggggcgttaccacaacacagacttacttcccgaaggataacactgctgaatttacaagcgaagacagtatcgttgactggctgatgcagtactcccctgaaaaggatgtgacatttgtccgcggtttccttggccgtatgctcttctcaggtgatgacggtctgaagaaagtcaatgttctctccggtggtgaacgtgtccgctgtatgctgtccaagatgatgatgtccggcgctaacaccatgctgatggacgaaccaaccaaccatttggacatggaatccatcacagctctgaacaacagtctgatcaaatatccgggtgttctgttattcacttcccaggaccaccagtttgtacagaccgttgctaaccgtattatggaactgacacctggcggtctcattgacaaacagtgtacgtatgatgaatatcttgaaaatgatgagatggcaagaaaacgccagattctcaatatggaagcagaagctgacgattaatttacagacaatttagtattcagacaggcacttgtcagcaattcttaaggattttttaaagcctttacccggcttatgtgctatgctaagagcagcagagaaatgatggatccatgatttctttgctgctcttttgctgttaatgtacttaattatcggaggcttaaaaattacttatgataaaaaacaaacgacttttattgatcatactgactatttttattctggctgctgccggaagttttttcattctttttgtcgatcaatggcatatagaaatcaatgatggctctgaaaataatgtcaaaatcgaatacggcgatacctatgatgacggcaccgtcactgccgcattaaaaggccggtatctgttaaagaagggattccctgttactgtcacctcagagggttctgtcaatacctccaagctcggcagttacaccatcaattaccatgcttctttccttttctggaaaggtgcggacagtaaaacggtgactgttgaagacacagttccgccggaaattaagctgacaaccaatccggatcattatacccttcccggccatccttatgaagaagaaggctatacggcatccgacaatgtggacggtgatctgacggataaagtaacccatgaagagaaagacggaacagtgatttataaagtttccgacaactccggcaatgagacaaccgtcacccgcaccattgtctatgacgacccggtcccgccggtcctggccttaaagggtgacagtgaaataaccatacaggccggttctgattataccgatccgggatataccgccgaagataatgtggacggtgatctgacagataaagtttccgtggatggttctgtcaatacctacagcgcaggtacttactcgcttacttataaagttcaggataattacggcaatgaagcagcggtcacccgaacagtcacagttgagccggtccgccaggcagacactgtcaaaccttccggcaaaattgtctatctgacctttgatgatggtcctggtgaatacacttccaagcttttggacattctgtccaaatacaatgtcaaagccaccttctttaccgttggttccggtcacccggatttgttaaaagccgaagcggacgccggtcattccattggcattcacagtgctacacacgattattccaaaatctatgccagcgaggatgctttttttgccgatctacgcaaacagcaggataccattgaaaatgccaccggtatccggacaacccttgtccgttttcccggcggaagctccaataccgtcagcaaaagctactgctccggtattatgaccaaactgaccaaagacctcacggatatgggatatcagtattttgactggaatgtcaccagcggtgatgccggcgaaacaaccagtacatccgttgtcgtacaaaatgtcatctccgggattcagcagcatgatgtctccattgtcctgcagcatgatatcaaaggcttcagtgtcaatgccgtggaacagatcatccagtggggacttgcacatgggtatacatttctgcccctgaccgctgaaagcccgacggcgcaccatggtgtcaacaactaatgaccatcgcatgactccacgatataaaaaagaggctgtgaaaaatgagtaaattcatttttcacagtctcttttaaatgatttttcaaccatatctttacatatagcatcccagaggcatgctgttctgctgcagcagatgcaggatagagcctacaacctgtgcacaaatctgcagaatatatctgcaatcattctccacagacttcactgcatgcagatattctgtatgacatttcttaataaatgcacaaatctcatccgccgaccgcatgttcacttcctggaaatgtgcatgtgtctctttcatttttctcacaaactccctgaaatccactttcagctgtgcttcataatgaatatgttctgtcatagttcccggatattcaatattatgcgggaatgtaaaataatccgcaatataatgggtaatgacaccgagatccttggacagaccgatggtcatgcctttattcttgtcatattcatcaatgactttattaatcttcttttcaagcttatggaatgtcagatcaattctgtgtttagttgttataaagctgggcacaaggtctggttccagacttccgaatctgaaagccagaggatggtcgatcatgtctgcatccacaatatctacaatgtatcctgctaatgataaatgagacttttttctcaatatgaaaccctccacacatatataactgcggcatcagccactttttctttcttttacttacatccccactattgtacacccttcctaatcaagaatcaatatcatttataaaaaattcacattccatttacacaggaagcgttcattcaccttgacattgccattcacatcatataaaattaatgtaattatacgattttacagaggagatgatttttttggattccagtgacgcgatgcagcttattgttctgattgttttgttggctttatctgcctttttttcatcagccgaaactgcattaacctgtgtcagcaaaattcgtatccgcagccttgctgaggagggcaataaacgtgcctgtcttgttaaggaactgacggataatccatccaagatgctgagtgctattctgattggcaacaatattgtcaatctgagtgcttcctcattatctaccatgctggccactaagatggccacacagctcggagccggtgccaacgcagcgacctttgttggacttgcaaccggtatcctgactattctgattttgatcttcggtgagatcacacctaagtcagcagccaccatcaatgccgagaagatggcccttggtgatgtggttattgtctactggctgacccgtgttctgacacctgtcatatttgttatcaatcacctttcctatggtgtgatgcgcctgatgggcattaatccgaatgcacaggccaagaccatgacagaaaatgagcttctgactgtcatcgatgtcagtcatgaagacggtgttattgaatccgaagagaaggaaatgatcaccaacgtggtggacttcggcgattctgttgccagtgaagtgatggtaccgcgtattgatatagaatttatggatgtagagagcagctacgaggatgtactcgctgttttcaggcgtgacaagtattcccgtgtaccggtttatgaaggtaacaaggatcacgtcatcggtgtcttgaatctgaaggatgttttctgttacagcgatcttccttcgaatttctctatccgcaagattcttcgccgcccatacttcacttacgagtttaagcgaatttcagacctgatggtagatatgcagaagaattccatcagtatggccatggtgttagatgaatacggtgccgttgccggactcatcaccttggaggatttgttggaagaaatcgtgggtgagatccgcgatgagtacgatgaagaagagaaagacgatatccgtaaggtcaatgaacatgaatataccgtagatggcaccaccaagctggaagatattgacaagctgcttgatctgcaccttgaatctgaagattatgattcaatcgccggacatatgatccatgagcttggtcatattccgacagaaggcgaatatatcgatattaacggtatccgttttactgttatgaagatggacaagcatcgtgtggccgatattgatattcgtctgccggaggctgaaactgaacagagcccatctgagcactgatcttcggtgtcatcatcggtggtgcattcagcacaatcgtatcttcactggtgaatgatattcatcaacaagctgaagaagcctgcacctgttgctgcgccgaccacaaaggtctgtccgtactgcaagtcagagatacatattgatgccgttaagtgcccacactgtgcatcagaccttgaggacacagaacagtagttttgccggttgttcatcccattcaatttatgcttataaaagaagctttataagatggattattttctcacaccacagccatcttacaaagcttcttttttatctatctgtatattgctgtctctgccccctgactaaacagccatttcctttaaatcatccgcaataatcagttctgcttccgttgcagcctggatttcttcgatcgtatattccggattgtattcaaccaatgccaaaccttcaggtgtgactttcattacacccatctctgttacaatgagattcacctgaccttttgcagtcagaggcaatgtacactctttgagaatcttatgcttgcctttatttgtatgctccatggcaacaatcacttttctggcacctaccaccagatccatggcgcctcccataccaggcagcatttttcccggaattttgtaattggcgatattgcctttttcatctacctgaagcgagccgaggactgttacatccacatggccgccgcgaataatggcaaatgagtctgcacttgagaaaaatgcaccatcatccgcaataccggccatcacaccgcctgcattcaccacatgcgggctttcttttccttcctcaagcggcaccagcccgacaaaaccattctcagactgaagagtcagatcgacaccttccggaaggtggttcggcaccaatgtcggcagtccgataccaagattcacaacatctccgtcctttaattcttttgccacacgggctgcaataaaattcttaatatctcccattattctgcacctcctacaagataatccacaaaaattccaggtgtttcaacataatccgcaccaatctgacccgcttccacaatttcggatacaccagccacaaccgtatccgctgccattgccatcatcggattgaagttgcgttctgagccgatataacgtaagttgccggatgcatctgccttatggccgccgatcaatgcaatgtctgcatgtaacggcaactccagaatataatctacaccatcaattgtctttatttcttttccttcagcgacttctgtaccaacgcccgtcggtgtgtaaaaaccgccaagtcccgatccaccgcatctgattctttctgccagggttccctgcggaacaagttcaagatcaatctcaccttcaaaatattttgcaccgaattcaggattcaatccaacatgcgaagcgatcagtttctttacctgtccattttccacaagcttgccgacaccgcttgcttttcctttccattctccggtttctttgtctttctttctgccaaaacctgcatcattacagataattgtcaaatcctttacattactttttacaagctcatcaataatcggctccggtgtaccattggccatgaatccaccaaccatcactgtcataccgtcttttaccagagatgcagcctctgctgctgttgtaatctgagtcttagccattttactcacttcctccttaagttatatgaagtatttatttttttatcctgcctatataataagcaattaccatgccaattgtttcctgtgtgattttatttttctccgaaacagttgttttaagccaaataattgttttaatcaaaatacatctataactgtaaaataacgtttttttgttgattatgtctattttttgtacatttattgttaaactatccaatttaagcagaatttgcttcctgtatttatgcgttttttaacctatacgtctaaaaagcgtacacatttattgatgtgtacgctttttagacatgttttattctgtaattgttatcttacttctaaccactgaataatggctcgataatgactgaatacaattaatggcatgaatgactgccgcatccgtgattgccgcactggtgaccaccctcaccatgttcatgatcatgatggctgcatttcacatctgcatcataattcaactgaccttccagaagtgcttcaacggcctgatctgcattgccgctgcatccgccaaacaacttgatacctgcctgagccagggcattctgagctccgcctccgataccgccgcagatcagtacctgtacctgatgttctgccaggaatcctgccaaagcaccatggccgctgccgtttgttcctacaacttctgaagcaacaacctttccattctctatatcatacagcttaaactgttctgtatgaccaaaatgctgaaaaatctctccattatcgtatgttactgcaatcttcattttaatgatcccccttatccttgttcaatacctgagctcggcatcgatgtttcggacatccgccgcacccgcaagttgtttctgcgccatcacataatcgatagtctccgccttcaatcctgagcatcttgccgtctacgacaacttccgccagcttctttctggcacagtcataaatctgctgcaccgttgttctggcaatatgcatatattttccgcactcttcctgtgaaaaattctctttatctatgagacggatcgtctcatattcatccaccgtcatcacaacgcatgcctcatctgacgcccctccgaaaggcataaattcggataccttcggaagacagcatacttttctgcactttcttggtctcggcatctcttcatcctctttcttaaatcaacggcaatacggatgcgcgcaatccctattgccatttcatgttcatcaactgttcgatataaatggcatatgtcatttatatcacagttatcggcatatgtcaataactcatctttatatcagtacctcaatccgccttgaagcaaatagttcaaacaacggctgcaatcctccaatggccatttttctattccgtcaaaatccgcttcacaatctgtcacaacagcaatcaagttcttcccgcagcaggataatgtacgggatattttctctctgacgatttctatcttcggcaattcactctgcttcataccttccacaagaataacatctacatctgaaaatccgttgatcagctgctgcaaatcgatttcttcatctgcattgatcatatatctgttcttcgaaaaaatcgctgtcgccgcagcgccggcttggtgatatcggtaggtatctgttcccggtctgtccccttcaaaatcgtgaccgtcatgtttgatcactgccgcacttttgccatgggattttatttctttgagcagtttttcaatataggtggtctttccggaatttttgataccgcagatgcataatattttctgttctttcggcatgttcaaagaggtatttttccaccgttcatgcgcttccggcgtattaatattgacaaaacatgcatctgggatccccatctctgccgatgacacaatcaaacagcggcttcgaatcagcaaatgcatcattttataatctttataccgcagcatttgctgaattaccggcaaaagcgacgggcgatacaaaccacataaagggtggattcgtccacgactgtcctgatagaccatacagtcatatccctgttcatacgcatccgcagacacctgaatcaggctgccgaccatactttctgtcaattccgggacatcgcaggctgtcacaaaaatccattcatcttcatcctttaactgctgcaagaccgtgtataggccgcctaaagggccgcagtctttgacaacgtctataagcccataacaatccttatctttgtatacattttgaataagcgccaactgcgccgcatcggctgctgacagataaatcctatctgctttctccaatgccttgatctgccttttcagataagattggccttttccatccttcatcagaaactttggctgtccgcccattctcgatgaatgaccgcccaaaagaatcgccgctttatgacattttaaagactgatgtgtcattatttttcactcccaaatgataatcgagtaggagaaaattcctcttgatgaggaattttcgacctctcacaccaccgtgcgtaccgttcggtacacggcggttcaatcaacttaacatgtaacacacctttcagtgtaataatctaacattgagattagtccaaatgaggctaatctcttgtttgttattgctatatttacagcaccacagctacatacatgagcataggctcttgaacaataaccaactttgtatgctgtaatcctgtcaattccaagcttcatcaaattcttcgcacgattctgcggagttttccagtgtttccatatgcacatacgaagtctataccgaatatttgcatctaatttcgcacataagattttcatactacctatcttgaagtagtttatccaacctcggataagctgattgagcttctctaccttatagctgttgctgacgccccaacttcgacaggtgagtcctttcattcttttcttaaacttcgctactgattttgcatgcggttttgccttaaactgatgtgctcttgaatcaaagtagaatccaaacccaaggtatttaagtccatttggtctatctactttactcttagtcatgttgactttgagccctagtttctcttcgatgaatcgtgagatatttctcataactctgtttgcagacatttcacttccaaccatgataatacagtcatccgcatatcgtacaaaattaagccctctcttttccatttccttatccagttcgttcaacatgatgtttgccagtagcggcgaaaggtttcctccttgcggtgttcccacaatagagtcctcatactcatcatctatcatgattccgctgactaggtatttcctaacaatagagatgacatctccatctttaatcgttctaccaataatagtcatcaacttatcatgatttactgtgtcaaagaacttttccaagtcaatgtctacaatccagtcattaccatcattcatcatatcaagtgctgttaggattgcttgctgtgcacatctattcggtctgaatccgtagctatggtcatggaactgttcctcatagattggtgttaagacctgtgcaatggcttgttgtatgaatctgtctgttactgttggtactcccaggtttctgacaccaccgtctggctttggtatctccactcttcgtactggttgaggtttatattttcttgtcctcaactgttccttgataatttcgccgtcctttacaagatgttctttaagttctgtgtacttcattccgtccactccctcggcacctttatttcgtacgacttgcagatatgctctgttgagattatcgctggatagtatctgcttcattagactacttgtgtccatgcgttctttcctttccgtctcgcttgatttgaccacccttttcccgattggttacggcagatgttgtcatttctgcaatacgagacatactcaaacttattgattgttcgccccttcgctccatctccattacagagacttcttcgctactatgggctcggctgacttctcacagttcgttgttactaggctaatgaaacctctgtgagacctccacgcttaaggtgcacgctctttcctctcatatatccgccacatttactcgattcctacaaacggcaactttacggctttgtcttatttagcagacttaccaagcggaacctagcctcatatgtgatttctgtccgtcggaccaagagtttgcttacagcttccttcagattctaccttacgatagacacccttgctgttcagctatacacttccttgtcgcctaggcgtgttcgggactttcacccgttagagcgcgcccatggcgcgcaaactaaaaatcccccgtactcacgatcatgagtacggggcactgccattatcgctattttacttttatttaaagtatgccacaccggattcaaaaatcttctggtccggattgccgtaaatatttcttgcaacggcttcaccgattcgctcggaatgtcccatcttgccaaggatacgtccgtcagggcttgtgataccttcaatagccgcataggaagcattcgggttgaaatcctcatccatggttggattgccatccaaatcaacatactgggttgccacacagcctgctgcaaagagcttcttgatccattcatcactggctacaaaacggccttcaccatgggaaatcgggattgcatagacttcaccaggtaccgcacctgccagccatggggatttattagagacaacctttgtataagccacctttgaaatatgacggccgatgttgttggttgtcagtgtcggggaatccggctgctgcggtgtaatttcgccgtaaggcaccagaccaagtttgatcagtgcctggaaaccattacagataccaagagccaaaccatctctctcgttgagcagcttcataacagcctctttcagtttttcatttctgaaagccgtagcaatgaatttaccggaaccgtccggttcatcaccggctgagaaaccgcctgggaacataataatctgtgcatcgctgatacctttgacaaaggcatcgacagattcacggataccgtctgcacttaagtttctgaatacctgtgtctgaacttttgcaccggctttttcaaaggctttcatggaatcatattcgcagtttgtacccgggaatacagggataaatacctttggctgtgcaatcttgtggttgcagatcacaatgctgccctctttataaatcgtggtctcaatcttcttctgctcaacacctgaacgtgttgggaagactttttcaagggtgcctgtccatgctttcagtgcctcatccattgtcacaacagtgtcaccgtatgtgaactgtgcatcatctgtcacttcaccgatcagtgtataagccacattgactttatcaagagcatccgccggtacttctgcgatcatgcatccatattcacctgtcttaaacaaatcttctgctttcacagtgctgtcaatcttagcgcccagcttgttgccgaaagccatcttggatacagctgctgcaacgccgccaaaaccgagtgtataagcggagatgacaactttatcctgaatcagctgatgaatcgctgtgtaaagagcttttgcctgttcgtaatccggcatatcataagcatctcttgcaatatcaaacttcacaatcttattgccgctcttcttgaattccggtgtaataatatcctgctgttttgccacatccactgcaaaggaaacaagggttgccggtacatggatatcattgaaggagccggacatggagtccttaccgccgatggatggcagtccgaaaccgatctgagctgtgtatgcaccgagaagcgcgctcattggctcaccccagccctttgcatcctcagtcatacgtttgaagtattcctggaatgtgaagcgaatcttactgaaatcaccgcctgctgccacaatcttagcaacagattctacaaccgcataagcagcaccgtgatatgggctccaattggaaagatatgggttaaaaccatagctcatcatagtgactgtatctgttttgccttttaatacagggagttttgctaccatggactgtgtcggtgtcaactgatatttgccgccgaatggcataaatacgctgcccgcgccgatggaagcatcaaacatttccacaagacctttctgtgagcaaacattcaaatctgccaggtctttcagccatgctgctttcacatcagccacatctgtcttttcttcaaaatagctgtctgcctttgaagctgtgcctacgataacatctgtttcctgatgagcaccgtttgtatcaaggaaagctctggaaatattcacgatttccttgcctctccagtgcatcacaagacgtggatcttctgttacctcagccacgcaggttgcctcaagattttcttcttcggcataagccataaatttgtccacatccttcggatcaatgacaaccgccatacgctcctgggattctgaaattgccagttctgttccgtcaaggccggcatatttcttcggtactttatctaactggatctgaagacctgctgccagctcgccgatagcaacggatacaccgccggcaccaaagtcgttgcatttcttaatcaggcgtgaaacttccggacgtctgaacagacgctgaagctttctctctgtcggcgcattacctttctgaacttccgcaccgcaggtgtcgatggactgggagttatgagcctttgaggagcctgttgcaccgccgcagccatcacggcctgtacgtccacccaagagaataataatatctcccggatcagaagtctctctgataacattgcttctaggcgctgctgccatcaccgcaccgatttccatacgttttgccacataatccggatgatagatttcattaacaagacctgtggccagaccaatctggttaccataggagctgtagccgctggctgcacctgtcaccagttttctctgaggcagcttgccttccagagtcttctccattggtacagtagggtctgccgcacctgtcacacgcatggcctggtaaacataagtacgtcctgacagtgggtcacggatcgcaccgccaaggcaggttgccgcaccaccaaaaggctcgatttctgtcggatggttgtgagtttcgttcttgaagttaatgagccattcttctgtctttccatcaatctcaaccggtacaataatgctgcaggcattgatctcgtctgtttcttcctggtcatctaacttgccgtctttcttcagttttctcatagccatcagggcaatatccatcagggaaacatatttatccttgcgtcctgcaaagatttctgcacgatgggcctgatacatatcataagcagcctgcatcggtgccttataatcaccatcctcaaatgtgacattcttcaattcagtctggaatgtggtatgacggcaatgatcagaccaatatgtatccagcactcgaatctctgtcatagacggatcacgactctcttctgccgcaaaatgttcctgaataaaccggaaatccttgaatgtcatggccagtcccagagaatcatacagtgcctttaattctgcttccggcatatttctgaagccatcaaaaatcttcacatctgccggttcttcatattctgtcaccagtgtttcaggcttatctgcattgttctctctggaatctacagggttgatacagaaatctttgatatgcgccagttcctccacagaacatgcgccggcaattacataggttgttgcggaacggatcaccggttcttcattttcattcaaaagcttgacgcactgttcagcagaatcggctctctgatcaaactgtccaggcaatgcctcaacagaaaaagctgtttctccttcctgcatcggaaatgcttcttcatataatacatcaaccggaggctctgaaaaaatcgtaatcttagcctcctcataagttttgtcggaaatattttcaatgtcataacgaatgagtacacgaacaccagttactgtgcggataccaaggtaatcacgaatattctcaaacaaatccttggctgctacggcataagccggtttcttctccacatatattcttctaacgctgctcataatgacctcccttaattcggcatggtatcttaatttacctttttactatatcacaaatatttttattaataaaattaatatatttaaattcatttatgacttcagctaatgagcaaatctgcataaaaacgcacatactgcttatcctatctataaagaacactcattattttataaggagatgtaataattatggcaaaaaaatccattaccaggcataatgaaaaatgcgatcacctggattatctgaaaacaagtgcttccgacacggaatgcaccggcgttgtttacaccggacccctgaatgatgtagaactggataatattaacgatgtctatgcctttgagccggaaccggcgaaaaaaagagaagtctgagaaaatttttatatccccaaaaagctttctatgctacaatttttttatagaaagcttttttatttagagtttttttacaatcattaataccgctatccgggtaacccgttaaaaacgtgaagcgtctttcattctctttcatattccctcaggaggttcttatgctgaaaaaatattctattccaatcattatgtggctggtttttgaaagtattgccgtcattctctggcaggcacttgacaatatcttttatctttttaatttttcatacataggcacatccattgccatcggactttttctctttgcccgcaaacagaaatatgcccgccatgtcattcagtttgccgttgggctttatatgctgggctatctcggctttcttcagcatgaaaacatgcagattgaaggtttttggtattatctgttcctgggtgtttttgaagccgccaccatccactatgccgtggccaaaatctttggcccatttatcttcggacgaggctggtgcggctatgcctgctggacagctatgatccttgatttactgccttttaaaacgcccgcatcttcccgcagaaaatggggattcatccgctatattgtttttgtcggttccctgatttttgtcagcagcctttttctgcttcatgtccaaaacattgaacaaattatgtggtacagttttctcatcggcaatcttatatactatgttgttggcattgcactggcttttatctgcaaagacaaccgggctttctgcaaatatatctgtcctgtcaccgtctttctgaagccggccagccgttttgcccttttccatatcaaactggacccggacaaatgtatcagctgcaaaaaatgcgaaaaaaactgcccgatgaatgttgagattctcaacataaccgagcagcgcaaaaaccattccgaatgtattctttgtatgcagtgcgtggacgagtgtccgaaaggtgctttaaaactgtagccttatttatgcaatcgccgtatcaccttaaacaccaccgtgttttccagtaccagcggttcattgtgggcaaagaagacgatgccgtccgtaggtgccacgatctgcatggtgacatctccttcataaggatcgataatttccgccatgacttcccccatgcggatggtatcattcgggcctttgagtcttctgaaaatccctgctgcattggctcttacagacatcagttcatcttcctccagaacactggcaatgtaaccactatgcccgtaatacttgatcagacccattctgcaaagaagatacccgtttttttcctctgtcaattccaatttttatatctgcccttcgtattgccgaaatcatttgacacgttcacagttatcatttactttctacgcattttatgatatattttaattattcttactaataaataaaacagtttttatttataattgctgttgaccggaggaactatggatatcaattacgaactttataaagttttctattatgttgccaaaacactcagcttttcagacgcttccaagcgcctgtttatctcacagtctgcagtcagtcagtcaatcaaggcactggagaagaaactgaatcagcatctttttattcgaagcaccaaacgtgtcaaactgacgccggaaggcgaggttctcttcaagcacatcgaacctgccgtgaatctgatcatgcgcggtgagaaccagatcctggatgctaatgcgctaaacggcggtcagctgcgtatcggtgccagcgacaccatctgccgttattacctggtcccttatcttcaggctttccatgagcatttcccgaatgtccatatcaaagtcacgaacggtacctccggcaagtgcgtggattttcttgaaaacggtcaggtggatctcattgttaccaactatccgaatcctcgaatgaataccgtaggcaatatccgcaaagtcaaggatttcaaggatgtcttcattgccaacaggaactttgaacatctgaagaatcatcctctgaactttgaagaactgctgcagtatccaattctgatgttggacaagagcagtatgaccagcgaatttcttcacaacatctgccaacagcgccagttggatctggtacccgaagtcgaactcagcagcaacgatctactgatcgaccttgcccgtatcggccttggcattgcgttcattcctgacttctgcctgcctgatgacgaccctgaccttttcaaactgaccatgtctgaggtctttccatcccgtcagctggttgtcggctacaatgataagctgccaatatccgaagctgcgaagtattttattgaaagtctgaacgaggataaataatacaacactaaacaaagtgtgcgcttgacgcacactttcgcgcgtaagcggatagcacagctatatattcctctccgcgcactgcgcttcctggcacgcagtgccttttatgtaatagaaaattccaacagaatttcctattacataaaaaagctgctgctctgcggtttcccgtaaagcagcagctttatctatatacgatacggttgcattcactgcgactactctgcgccgttgaataactcattgaactcctgttcatcgagcatctcatcgaagtaatctgatacaagctcaaactcatcatcgtcctcgatcgtctcaagattaacctcatcatctcccagttcttcgaaccgatacaggaagatctgtgcatcctcttccacatggccttcgtcattcattggcagaagtgcgatatactctctgttattcaccggaaaaacattcaaaacgatacattccagctttccgccgtcatccagatcaagtgtcattgtatctctgtctttaaactcagagtcttttggttgtcccatttaattacttacctcatttcataaaaatgttccgctgtccgaaagtcagaattttctccttctaaacagtctgaaaacaatcaatcagttccttaactttataacatacttcctgtactttttcaatactaagactgtatttttaacaattgatttgccagacaaaattgaatatccagtttcttttcctgtcgtattttgtcgaaccggataacaatcgctttatccgtcacttccttgatcacaccggcgccatatgtctgatgctgcacgcgcatacccggtttgaccgcatctctgtccacaagaatctctccaacaaaacgtgacatcaccattggccgtccataacgctctttcaaaaagaaaatatgcagtctggactttgcacgggtcatagccacataaaacatccggcgctcttcttcaatatctgcatccagaagggctttatgatgcggcgtcaccgtctcattggcatccacgataaaaacaatctgatactccaatcccttggaatgatgcattgttgccagagccacgccatccgtcttctcttcgcgctgttttctggcctgctttcgcagttgttctgtatattcttcaatatgtccaaaccattcctcatacgtcgcataattcctggcactatcctgaagttcatccagcagctcaattaactcctgtccgtccatcttccgttcttcggcatacttctcaagaaattcatcatatccaatcccatgccgtatgtaattaatggctgcaaagggctgcatctgcgtcaacatatgcacatcataagcaaacttcgacaaacgctcctgcatccatggcttatccttatactgctccagcagcacatcaaaagccacctgacgctcacccaacatctgtctgctcacataacggttcggccggttgataatcctcagataatgacttctggccgtacttccgagagcaatctggatataagccataatatcctgggttacccagtgctgatagatattcggcatggcatcctgcattttaaatggaatattatactccatcatcttctctaacagcattctggcctgggtattagttcgaaacagcaccgccatcgcatgatacggaatcccctgatcatggtaatcacggatttcacggataaccgccgcattctcatcagccggtcccttgaaaacacggatatccaccggttcctcctccggccgcaccgcctggatctgcttgtcaaaacgctgtttgttattcttgatcacgcatcccgccccgcgtacgatagctgcctgactgcggtaattgacagaaaggaaaaccttcttcacatccgaaaaatctttctcaaagttcagcatgatctcaggcctggcccccctgaatccataaatggactggtcatcatcccccacaataaaaatattgttctgcggcaatgccagcatccggatcagcttgtactgcagcaagttaatgtcctgaaactcatcgatcaggatatattgaaacttatgctgccaggctgcaagaatatcctttcgctgggtaaaaagttcccaagtataaaccaacatgtcctcaaaatcaatcagacggctgttctccatcctctgaacatactgtttataaatatctctgaacacggatgttgcacagctggtggcataataatgctcaatatccatcacgcttcctttaacaagtccaatctcactgagcacatcattgacaaactcactgacattatccggttctacaggcatatcttcaatgatctcccggatcagctgctgtttctgctcctcacgaatgatattggatgccgtatagttataagcatgtttcagcaccgaaaagaaaattgcatgaaaagtgccgaaactcacgggcatcgtcctgccgtccatcagagaaacaaaacgctgccgcatttcatctgcggcagcttttgtaaaggtcacaaccagtatgcccgccggatggacaccggcatgctcaatcagccatttcacacgatgggtgatgaccatggtcttgcccgaacccggtccggcaagtaccatcatcggccccttatcatggcagactgcctgaagctgagacttatttaactccataaagcctcctatgcttcctggcttaatctgtcgatggctgtctgaattcttgcaagcgattcttccttgccaagtacttccatcagttcagttgcaccaccaggtgtcatctgcttgccggataaagccacacggatcggccacataacaaaacctaccttcttctctttatcctttgcatactgacccagcagttcaaacagcgcatcattgctgtagtcttcctgtttctccagtaaaggctgcacttccttcagcacttccagagaattctcaagatttgtcttattcttcttgtgtacgtacatattgatatcataatccggtacctgttcgataaaatcgatctgatccttgatatctgcccagatctcgatacgtgtcttgatcatagatgccagcttctcaaagttcacatcccttgaaacaacttccttcatatgcggcagtgccatctcatagaacttgtcaaaatccatcttcttcagatactcaccattcatccagcgaagttttgtcatatcaaaaacagccggggtcttgctcatatgatgataatcaaattccttcaccagttcatccagtgtaaagaattcattgttgtcctcaggactccatccgagaagtgccacaaagttaataaccgactctgtcagaaatccctggtcaataagatcttcataggaagcatgaccacttctcttactgagcttcttgtgttcctcattggtgatcagcggacaatgcacataaaccggtacttcccatccgaatgcatcatacagacgattgtacttcggagaagaagaaagatattcattacctctgacaacatgtgtaatgcccatcaaatggtcatccacaacattcgcaaagttgtatgtaggaaaaccatcggacttgatcaggatcatatcatccaattctgcattcggcacggtgatatcgccataaatctcatcatggaaagtagttgtgccttcaacaggattgttctgtctgataacataaggtacccctgctgccagcttggcttcaacttcttccttgctcagatgcagacaatgcttgtcatagtgaaaaatctctttgccattcacggttgtatgcagcgttgcaaggcgctcttcatcgcagaagcagtaataagcttcacccttgtcaatcagtttcttcgcatactcaagataaatgccctgcgcctgtctctcactctgaacataagggcctacgccgccatccttatccgggccttcatcatggatcagacctgtgctggccagtgtacgataaatgatatctaccgcaccttccatctctctctcctggtctgtatcttctattcttaataaaaactgtccgccctcatgcttcgcgatcagatacgcatataatgctgttcttaagttgcccacatgcattcttcctgtcggacttggagcaaatcttgttcttattgtcttacccataacttcgtctctcctttattcactatggccgccgaagcggccgttatcttttacacggatgcatcaccgtcatgtaatttcggtgaattttgctcgttgatccagcttataatataatatcctattcttcgtctgtaatcaaggtcaaatctctatgcaaattgctatttttcacccatttatcctgatgagtcactctccctcacaaggagcttccggaaggcctgccactgacgtcaatatactgacaatccctgccacaatagcagaagacaaaaccatccgccagtcaatagctgacaaaactgtactggttcccataaccgccactgctgtctgcgccattgttttaacagctcgaatgccagcattgaccatccactttcttgtattcacagaatctttaaatacacaatttttaaacatccattttccctcctgtcatattattatggaagaaaaatccgttggttacaaaatagaaccaattgtgcactttagcttactattgacgcgaaaaagcggcttccatatggaaaccgcttctatgcagttgacgggacttgaacccgtacccagttaacccagactagatccttagtctagcgcgtatgccaattccgccacaactgcgtttgatattgcctaaataatataacatatatttatttttttgtcaaaggttttttaataaaaatttttttctatatttttttctattcaaaaagcggcttccatatggaaaccgctttcatgcagttgacgggacttgaacccgtacccagttaacccagactagatccttagtctagcgcgtatgccaattccgccacaactgcgttttagataatcgcaagcgtctgtgctgctcacaagtaatatcatatcatttgtttcatcttctgtcaacaatatttttcttatttttttaaattttttaaattgtatattgtttttacaaaacattccctttgggtacttactgaacgttatttctcattaataccgatgacttatctttgacatatcttttgccatcacctataatataagaagcaaaaaaagaattggagatttcccatgcctaaaaagaaagattttatcctgatcggcgttttactcgttattgccctgatcggcctgggtgtgacacagtttcttcagcatcagaccggagcatccgtcaccatcacaattggcggtgagatctacggcacttatcccctggatcagtcccgtaccattgagatcaatgacgctaaaggctacaacaaagtggtcattgagaatggcagcgtccacatggcggatgccgattgtccggatcaatactgtgtccagcacgcagccattcatgccggccatgaaacgatcatctgtctgcctcatgagctggtggttgagattaccggcggcgaagtatctgacgtcgatgtagtgacacaataaggagtttttcattatgacaaaaaaactgactatttcagcacttctggttgcattggcaatgattctcagctatgtagaagtactgattccatttaacttcggcattcccggcatcaagctcggactggccaatctggtggtcgttgtggccctgtatctgctgaatgccagacaggcactgatgatttccgttgtacgtattctgcttgtatcctttacattcggcaatatggccgctctgctctacagtatcaccgggggacttctgagcttcgcagtgatggttctctgccgcaggatcaaaggtctctccacgatgagtgtcagtgttgccggcggcatcagccacaacattggccagattctggtggctgtattcgttgtcaagaacctgaatctgcttttctatctcccggtacttatgatcgccggcatcattacaggtttgcttatcggccttgtggccggtctgatcattccttctgtcagaaaggcactgcagctttaatcattaagcgcacaaaagcttcatatatcaggtgttcattccccgatatatgaagctttttgtcgtatatgcacttagcttatgatacattgctgcataaaacgcctccatgctaatcctctttctttccctgaacaagatatgtcgtctttcctgctgtaaaagactgttcaaaatcttcctcttccgacaaactgatcaaaatatcatcaatcatcatatcgccgtccgcatccacatcgaagggaatatcaagtccatacagataatctgaaaccgcattcatctcatcatgataggcagaggaatcaatatctccgatcacaaaagtctccttcttctctttactgcccttttcctgaacatgaatttctactttatacatcactgctcctcctgttttcttaatcattcgttttttatatgcctagtatatcatgattcgcacctttggtgcttgacgctgcatacgcagctatcatgatcgccattcgccgctcgcgatgaacaagcattgcttgctcccgctcgctaacgctcattatatcatgtttgataaaaatttacagcactttgaaatcaacatttgacattattggtacaatttactataataataaatggaaaacatatattacatatatgaagggagacttaattatgacactcgacgaaattaaagtagttggtattgctggtgcaggtacaatgggcgcttccatggctcagattttcgcacagtatggttacacagttatcatttatgatgcatttgaagcaggtcttgaaagaggtaaacatcttgtagagatcaaccaggcaagcttagttgaagctggtgatatcacagcagaacagtctgctgagatcaagacaaagctcagctttacaggcgatatcaatggtcttaaagactgcgatatcatcgttgaatccgttcttgaaagacttgacgttaaacaggatttctgggtaaaggcagaagctgttgtatcccctgactgtatccttgctactaacacatccggtctttctatcaacaagatcttcgctaactgcaaagataagacaagagcttgcggtatgcattggttcaacccacctcacatcgttcctctgatcgaagttatcaacaacgatgagacaaagcaggaaatcgctgatacagtttaccagctgtccttaaagattggcaagaaacctatctacgttaagaaagatgctcttggcttcatcggcaacagaattcaggctgctatccttcgtgaagctgtttacatcgttgaacagggtatcggtgactacaaagacgttgatggcgctatgaagtacggccttggcttccgttatgcctgccttggaccttgcgaagttgttgaccagggtggtcttgatgttcatcatcacatcgctacatatctttgggaagacctttcagacgctaagtatccatcaggtgaattcgaagcaatttaccaggctggcaactacggtgttaagacaggcaaaggcttctatgattacagcggtgacaaggctgataaggctatcgaagctcgtgacgctatgtaccttgcaatggctaaatgcaacccaacaggtgttggtgaagcacacggctacgagaactaatatttcgagtttatagattatttgatctataagatatagttaatctctggaactcccggaggaaatgcccgttggcattcctctgggagttctttttctatgttttcactctatctgattttcgctgcctgtttcaacacatacattttctgggtaacttctgtcttaaaaaaaagagcatcccaacacctatcggaatgctcttctatcatattcttaattctgattaagcaagtttagcctttgctgtttcacataatgctgtgaaagctgctgcatcgctgatagccatttcagaaagcatctttctgttgacttcaacacctgcaagcttaagaccatgcatcagtttgctgtaagataaaccgttcattcttgcagctgcgttgattcttgcgatccaaagctgtctgaactgacgttttctctgttttctgcctgcataagaacttgttaaagctctcattacggactgttttgctactctatactgtttagatctggcacctctgtaacctttagccagttttaaaactctgttatgtttcttcttagcgtttaagccgcctttaattcttgccattttgtcgttcctccgtttctattacaggtaaggtaaaatcttcttcattacctttgcgttagttgaatctgtcatagctgcatgtctgagatttctctttctctttgcagatttctttgttaagatgtggctcttataagctttcattctctttaactgaccagtacctgtttttttgaaacgctttgcagctgctctacttgtttttacctttggcattttaatgtcctccttaatatgaaaatggtctaattacgtttttcaactaaaaacataaccatgctcttaccttccagcttggcaggtttatcaattaccgcaatgtctgataacttctgagcaaaatcttccagaatcgtcttgccgactgctgtatgggccagctctcgtcctctgaaacgaacagcaactttgaccttattgccgcctgatacaaactttcttgcctgattcacctttgtattcaggtcattcgtatcgatgttcggtgacaaacgaatctctttcacttcgatggtcttctgtttcttgcgtgcttccttctctctgcgcgcctgctcatatctgtacttgccgtagtcgataatcttgcatacaggtggtttggctgtcggagcgatcttcaccagatccagattcgcctctctggctaatttcattgcatctctggctgacatgatacctaactgttcgccgtcttccccaatcagtcggatctcccgatctctgatctgctcattaatcattaattcgctaataattgacacctccatgtctcatgacttttattcataacattaaactgaaaatggtgagcagaaaactactcaccatttaagacacgtaatgtgtaaaatacttaaatatgaacccaagtcatctgaaatgctaaggtgagagtgagtactctgctttctcgtacggatgttgtgtctatcacacaacttcatatattttaccacctttgcatttcaatgtcaatagactttttggaattttgattttattttgttttaaactctattgcaaagttaaattccacccctctgtggaatttaatcctgcaaatcaccctgctttcaaatgtggaatttaaagatacttggctcagtagagccattgagcaagaagcccccacttcaaaatctgtgatttaagtggtgggagcatgtcactgtaatgaacgtgcatgaattcggaaccggattctgcatcaggacggacgaataagtcctgaatttaaattggtaagggagaggaccatggagaagattattgagcttaagaatctgacgaagaattttgatgaccagcaggttttgaagggcatcaatctggacattcatcacaatgagtttttgacactgctggggccgagcggttgcggcaagacaacaacactgcgtattattgccggttttgaggaagccagcagcggtgaagtgctttttgacggcatggatatttccaaaattcctgcttataaacgtgaaattaataccgttttccagaagtatgcattatttccgcatatgaacgtgtttgacaatgtggcttttggtctgaatatcaagaagatggataaggctgtgatcaagaccaaggtagagcggatgctgtccatggtcggtctggcgaattatggttccaaggacgttactttattgtccggcggtcagcagcagcgtgttgctattgccagagccctggtgaatgaaccgaaggtactgcttctggatgaaccgttaggcgctctggatgccagactgcgtaaggagatgcagacagagctgaagaagatccagaaggaagtgggtatcactttcgtgtttgttacccatgaccaggaggaggcgctctccatgtctgatacagtagttgttatgaatgagggaactattcagcagatcggtactccgattgacatttacaatgaaccggagaaccgctttgtggcaggcttcatcggtgagtcgaatattatcgaaggtgtcatgatcaaggatttcctggtggcttttgacgattttgagtttatctgtgtggataagggcttccctgagaatgagcctgtggatgtggtgatccgtcctgaggatattgatattgtgcagccggataaagctaaattgaagggtatcgtcaaatctgtgactttcaagggtgtgcattatgagacgattgttactaccaaataccgcgattacagaatcgacacaacggattattttgctgtcggactggaagtgggactgacatttacgccggaagacattcatgttatgtggcagatggggagttactagatgaagcattttagaaaattaacagggccgtatttcgcctggttggtgctgtttgttctgattccactggtgttgatcgcgatttacgcatttaccacaagcggcaatccggtgaaaacactgaactttacattgatgaattttgcgaagatcaatgaaccaacttatatcaaagtatttatcaagtccattgagatgggtgttctgacaaccggagtctgtctgattcttggctatccgatggcttatcttattgcaaaatgtccggaggagatgcaggatatgctgatcatggcggtaaccattccgacctggatcaatatgcttctgagaacctatgcgtggatgaacctgttatctgacaatggtattattaacggattgctcagtgtgttgggcattaatccggtgacaatgatgtatacgaatttttccgttgttgtgggcatggtctgcaattttatgccgtttatgattattccgattcatacctcactgagaaaaatggacaattctctcattgaggcagccatggatctgggcgccaatccgttccagacatttcaaaaggttgttctgaaactgtccatgcccggtgtgatcaacggtattgtgatggtattcctgatggcgatttcttctttcgttattccgaagctccttggcggcgggcaatttgtcctgatcggtaatctgatcgaatcccagtttgtatctgttggagactggaatttcggcagtgccatttccctgattctggcagttctgattcttgtggcgatgcgtctcatgaagaagatggatgtacaggacaattaggaggcggacatgcgaaagaaaaacagtttattttcaaaattttatattgcgatttgttttgcttttttctatctgccgattctggtgacgatggtattttcatttaattcatcgaagtcattgtcgaaattcacaggattttccctgcgctggtataaagcgcttttggaaaacagtgagattatgtcggcagtttatgtttctgtgaccattgccatcctggccaccattgcttcgacagtgttgggaacaatgacagccatcggcctttcaaagtcacggaagattatcaaagatatggtgctcagcatgaatgatattccgattctgaatccggatatcgttacagccatcggatggatgctgctgttctcatctctgggattccagaagggatatatgactatgcttctggcacacattgccttctgtacgccgtatgtcattaccagtgtgtatccgaaggtgagaagcctggacccgaatctggccaatgcggccatggatcttggtgccacaccgtatcaggcactgacgaaagttattcttccgatgatccgaccgggcatatttgccggtgcgctgctggcttttactatgtcttttgatgatttcgttatttcctattttgtatcaggaaacggcgtcaagaacatttcaattgtcgtttataacatgacaaaacgtatcaatccgacgattaatgcgctgtcaaccattgttattgtggtgattgttgtgattctgcttctggctaatctgcttccgagactgggcggcggtgacaacaagaagaataatcagaacatgaagaaactggtggcaggtgtagctgtttttgcattagtactcagtcttgtgacctgtgtggccaacaagagcaataacaaagaggcaagagtgctgaaggtttataatgccggcgaatatatcgattcggatcttctgacagagttccaggatgagtacaattgcacggttatttatgaaacatttgagtccaatgagatgatgtatacaaagcttcaggccggagatgcctatgatattctgattccttcggattatatgatcgagcgtctgatcagggaagattatctgcagccgatcgattgggatcgtctgaccaatgcagagggattgaatccggatgttatgaataaagaatatgatccgggcaatgtttactccgttccttatttctggggtaatgtgggtattttatatgacaagacagtggtggatccggcggacctcagtgaaggctggaatctgctgatggatacgaaatatgcaggtaatctgtatatgtatgactctgagcgagattcctttatgattgccctgaaagccctgggatattccatgaatacccacgataaaaatgagattcaggcggcttatgaatggctgattcagcagagagataccatgaaaccagtctatgccggcgatgatgtcattgacaacatgatttccggcaacaaagcactggcggttgtttattccggtgatggtgcctatattatgtcggaaaatgaggatctgggctttttgatgccggaagagggaacgaacctctggtatgatgccatggttatgaccagagattgtgagaatacagaactggcttacgaatttatggattttatgctgagagatgacgtagcttacagaaatacccaatatgtcggttacagttcaccggttgtggctgcttatgagcaggcacaggaagaggattacgaaggtatcgaggcatatgtaccgcgtgtcggctacgaaaaagatgaaattttccgttatcaggatacggatattaagaaattatttgctgagctttggacaaaagttaaggcacaataaactgaaagggctgttgttttattcggggtaatgaatagagcagcagcctttttcaagtggacttgtcgggcagattctgttatcataagagtagaaaatatcagggaaaggggcataggtcatgaagcagatgaagctatcggtaggagtctccgattttgaaaagattcgaagcgatggttattactatatcgataaaagtggctggatcaaaggattgctgaaatccggagcggaagtaactttactgacgcgaccgaggcgctttggtaagacgctgggaatgagtatgcttgctaatttttttgatataacaaaagataacagggctttatttgaaggtctggaaataatgaaagacacagagttgtgtcagcattggatgaatcagtatccggttctttttttatcttttaaagatgtagatggcacatcttttgaaaatgcactggcacttcttcaatttacactgtcccaattttgtgatgtgtatgcttatctggaagatggtgaacaggtgacggaagttcaaaaagccatttttcatcgattaaagatgcaaaccgcttctctggtggatatacaaagtgctttgttagtcattatgaggatgatgtgggcttattatgggaagaaagttattttgctattggatgaatacgatgtgccgattgccaaagccagcagtaaaggttattatacggaaatgatggaagtcctgaaaacgatgctcagtatatcgttaaaagataattcggtacttgaattagcggttgtcacaggttgcctgaaaatagcaaaagaaagtatttttacaggtacgaataattttgtttctgatacgatttcaatgtcaagatttaatgaatactttggttttacgcaaaaagaagtagatcagattttgctggatgcgggcgctgcttcgcatgcacaacaggtgaaagcgtggtatgatgggtatcattttggggaatacgatatttattgcccatgggatgtgatgaattttgttcgtgattttcaatttgacgcaaccgtaaaacctgcaagctattggaagaatacaagtgataatgcgattatcaggtcttttattgattttgcgggtaatagtatcactgccaaaatggagacactgttggcggggggatatattattgaacgaatagaagaaaatctgacctatgattatcttcatgcatcggaagataatctatggagtatcctgtatttaacaggttatttaacaaaagtacgtgaccgggatataaaaatgccgcttccggatgggatgactgcattgttgattccaaatgctgaaatcagagagatttttgagacaactgtcaaaaaatggtttgaagacaaagccagaacatggaataaaagactgttgtttgatgctgtctggtgtggtgatagcgagaccctgacacaggagatgaataagcttttgcgtcagaccatcagttatcatgattatagagaagatttttatcatgcttttctggcaggcatttttacaggagctggatatatggttcaatccaataaggaacatggagaaggccgcagtgatctggttgttatggatactgaaaatggcagggtcgcagtttttgaggcgaaatattcaaaaatgttccagcagctggaaagtgattgtaataaagcaatcaatcagatagagagcagaatgtatgccagagaatttgaagaaaatggagatgacgttttttgttatggcattgctttcttcaaaaagaggtgttgcgtcaagataaaaagttaaattattggtattattttggttgaatatgggggtggcagtatgattaattattcagaagatgcaagcagacagtatcatattcaggtggcaaaaggggaagtgagtcggtatgtgattctgccgggagatccgaagaggtgtgtaaagattgcacagtatttggagcatccggtgttgattgcggataacagggaatttacaacgtatacaggcactttggatggcgtaaaagtcagcgtgacatccacaggtattggcggtccgtcagcctctattgccatggaagagttgtatcgctgtggtgcagatacctttgtcagaatcggaacctgcggcggcatgcagccggatgtgaaaagcggtgacatcgttattgccacgggagcagtccgtatggagggcaccagcaaagaatatgcgcctattgaatacccggcagtgcctgattttggtgtgacaacagcccttgtttcggcagcgaaagccttgaagatgccgtatcataccggggttgttcagtgcaaggatgccttttacggacagcatgcgccggaattgatgccggtgagctatgagctgcagaataaatgggaagcctggaagcggatgggctgtctggcatcggagatggaatcggcggcattgtttattgtaggcggccatctgggggtacgtgtgggctcctgtttccttgtcatggccaatcaggaacgggcgaagctgggacttgagaatccggtggttcatgacacagatggggccattcatgtggctgtggaggctatcaggaatctgattcaggaagatagaggataggctttatgaggctaatggagtgggcggaattagcagataaaggcagagaatgttggaaaagattaaaataatgtggataaagggggctgaaaaatgagtgaacggtggacaaatactgcgaatgacaaaggagaattgtcagagatgttgattcagtcattgatagagaccgctgtaaaacagcttcgattttcctatacaccctattcacattttaaagtgggggcagcacttctggctgcagacggcacgatttataccggatgcaatatagagaatgcggcctatacaccgacgaactgtgcggagagaacggctttcttcaaggctgtcagcgaaggtgtccgtgattttcgtgcaatctgtattgtgggcgggatgaacggtgtactgagtggttatacggcaccctgcggtgtctgccggcaggtgatgatggaattctgtgatccggagacatttcagattatcctggcagcggcagacggcaaatataagatttaccgtctgaaagaattgctgccggagggttttggctctgataatcttgttatttccggcggttttcgaagtaaataaaatggtcaatagcatcgaggatgtctttgaagtcgtctttcggtgctatttctatgtagcgggtcagtaattcggtttcggaatctttatagcgtccgtagaatgtatcatagagattgtgaccccgcatgtggatgcggatatcttccatatgctgacgcacatcctccggtgatgtcaaatcatgaccgatggcggccaccagtttttctccactggaaagccgatgcagatattcgtgccatttttcgtaaaatatatcataaaaagcttcggggcttggaacaacgccgagttttgccataacatccggattgaaaaagtaattttcaaaggagtaatatttcaggatcaggacatttttctctgtaacccttggcaaatggtcgatatcactgatattcctttcatcataatagcggcagagctgatgcttcagcatatccgcgtctttgccgtcaccatcacggatcatcaggaagctgtctttcagataaatctggttgatgtatttcaaattggcataggtcttgatattggtgcagctgttggtagtgatgatggccacacgggaaggcttgccttcatcatcgtatatttcggagtaatattttcgcagcagcagcggcagtcggcttttgtcctgacggccttcgacaataaatacaaaatcgacattcatcagatcattggcgctgtatcccagatcattgagaatgacgctgatatctgtatgttcacgaacagtggaatagccatcgctgtccaatacaacctgtcggatctgacggctgttgaaattcggcagcagattcggtgaatgggtggaaaaaatcacctgatttttgcgggccagacggaaaagaagatcaccggacagtttctggagttttgggtggaggaaaagttccggttcctccaccataatgatgcctggggtcggattgtcgtcttctgcgtaggtttcaaggagcgaaagcatataaatgctgcgcatgcctttgcccatatgttcaatagggcgcagcgttttctgcttttcatctgcaatttcagcggtaacggaaagcatctgctcgatatcacggttcatggagtagatgatttcatgctgaccgccgttttttttgtagttggcattaactcttctggaaaaatcatccagattcagctgatacagcttgtaatccagcaatctggccgcttcaaaggcatttaattcggcaggtgttttctggttgatcagaccgatacaggaaaagcagtgggtgcatggtttggcggaatcaaaaagacagcagccagaacgcatttgttttaaaaggctgtcttcctgcatgagcagcaaatcgtcctgaaattgccgcagattgcgctgcgggtccagataatagaccggcggcagcagtctgggaatccagttgttattcttctgatatccgtcgctgtaacggattttcccgtcgcggttagcgataaatgtaaaagaaagggcctgggtcgcctcatcataggatggcagttttcttttgaaatcctgaaaccatttgtcaaatcggcggtaagtgctgatttgacctgcagcgtggagcattttcaaatcattgtcgcttaagagcaggcagacggagatttctatattggcgtaatcctcctgaaaatcatccatttcaacggcacagctgccggtgacaacacgaatggcatcgagaatggccgttttgccggtgttgttcttgcccacgagaatcagggcgttttcgatatcggtgatcagcaggtcgctgatggacttgtaattgcggatacgaagttcagtgagacgcaaggcggtcagtcctttctatataaatatgtttaatatgtaactgttcagagccaagcaaaatttcaaaaaacaggtatgaaatgcgtagtattttggaggttggctctgaacagttactttaataatataagaatatcatagaaaaggttggagaagtatataaaaatgccctttagagatatgtttctaaaggacattttaaactaaatgtgtatgcatttaactaatgctccagaaaggacacaaatgcggcttttttgtcgatttttttgccaacaagagcgacacccttacccatggtaaaagcagccagcacagtgccgatgccgaggccggatatatggccgaggaagaagaatgtcatgcaggctgtgatgatcaggcaggtcacgtcgtagctgatttttattttagaatagggtttgcctgtgatatcttccatttcccgtgggaacaaatcggttggtgtgattggcagtttgcagcggttggaaagggcaatgccgaaacacaaaatcagataacttaatataaagtaagcaactcgaaggggaatactcaatggaagatggtcaacccagagttcattgatatccatcatttcaccgaagcaaaacccgacaacaaagctgaacaaataagcagggatgaatttgcggcgaagtatcataagaacacagaccagaagtccctgaaagatatacgtccatgtgccaagagaaagcgttggtaatactagattaaaagcatagggaacgcttgaaatagccgaaataccggaaccggaatggagcatcagcagaacgccgatactgttgatgatgacggccagtacaagaaccagttcacctcgcagtacgggtctatgatcattagttgtcaaaaaaatcactcttttctgaaatactttaaaataaaaagtgccataagcaccagagcaattataaacctattttactgcgttatcaagatgaaatttaatcgattgtttttaacgaatgctgtaagaaaagttaggttgtagttactctcaaaatgtggtacaacagtagtataggataaataatagaactggattccggacagctgggggaagctggctttggaaggaaaggaaaaaggggatatgaagaaagttttagttgtggggagcttgaatatggatatggtcctttccgtagatcatcatccggtgccgggagagacgatcattggcgatggcattacttatcatccgggtggcaaaggggccaatcaggcctatgcagttggcaagttgggcggcgatgtgcgaatcattggctgtgtcggatgggataataatggcatgattttgacggaaaatttagcccaggcaggtgtggacacaacggcaatcaatcgtatgccggaggcaccgacgggtatggcgattatagatgtggacaagaagggcgacaacagtattattgttatttccggagccaatgcatgcctgacaccggatctgcttcgcaaacaaaaggcgtctgtggaatggagcgattttattatgacacagttggagacgccaatcgacacggtacttgaactggccagaatggccaaaaaggcagataaatgcatgattctcgatccatcaccggccagagcggatctgccagatgagttatttcctttaattgatattatgaaaccgaatgagaaagaattgagtatactgacaggtatgccgacagaaacagatgaagagatcaaggcggcagcagatgcactgcttgaaaaaggtgtttctaaggttgtggttacccttggagcaagaggtgccatgctggccgatggcaatgagaagcttttctttgaggcaaagccggttgtacctgtggatacaacggcggccggagctgcatttactgctgcaatggtcaatggactggcacaggaaatgggaatgatacaggccattcgcatggccaacggtgtggcatcgattgttgttacgcgccatggggcacaggcttcgattcctgacagggatgaaatcgatgacctgatatggaactattaattctcagtaagtgcagttaatttttccggatggatgagttcgatggtgccgcgggatagtcggatccaaccttcattttgaaagtagcgaagcatacgggtgactacttctctggccgttcccatgtgattggcaattttttcatgggtgattttcaggtggttggttttttcaatgtcgctttcttgaattaggaattcagccagccgcttatcaaagcttttccatatgatctgttccatcagccacatgacatcagaaaaacggctgctgagaatttcatttgtataattggccagagcagcggacgcttccatgacggatttatagacattaggcgggatcagccagaaatccgtatctttttcggcttcgatgatggtgtcgaactggatattcggcatcatgcaggaggcggagaacagacacagatctctttcaaacaggcggaaaagtgtgatttccctgccttcctcagatatcatataggcgcgcagctggccggaatgaatgagcagaacgccaacacagtcaagggaaccattgtgaatgatggttcctttttttgcatgttcataacggacagcgtgttcaagctgttcctgctgtccggcagttaatttattccaaacgggaaaaaactcctgaaaatctttttcttttgaaatcaaaatatatcctcctagtttttggggagctgacaaattgtcagcttcatcaagagatagatggctttcctgaatacatagcaaaagttgttttcagtataaagaaatttgtgatggaagtcaatgaactttggtgacaaagtcacggaaggatttccgataaaagggtatactacagacataagaaacagataagacatgaacgataagaaaaggagatttgatagaggatgagagaatttaataaaagaactttggatgaatatgttgcggaaggcaaaacagttttagtggaatttagtgcaccatggtgcgtgtactgcagaaggctggcaccggctatggagaagattgcagaggaatataaagatatcctgacagttggctcagtgaatattgataatgagcaggaattggcaagacaggaacggattgaagttgtgccgacgctggtgctttacaaaaacggacaagctgtggattctattgtggggccgggttcgaaggcggcagtcgaggactttatacaaaagaacagctgaggtcgaaatatgagcaaaatattatgatatgacagaaattcggaaaatgtatttagaaatcatcggatagtgcggtatagaatggaggaacggaatgagacatttatatgatgtgattattatcggcggcggtccgggcggttatacggcagcactgtatgccgccagagctagtctggatacactggtacttgagaagttatcagcgggcggacagatggccctgacaacacagattgataattatcccggttttgagtcgggcattgatggtttcacgctgggagaaaaaatgcagcagggggcagagcgctttggggcaaaaacagaaatcgttgaagtggatggcgttcatttgcagggacctgtaaagacggtgcataccaatgaaggaatttttgaggcaaaaacagtgattctggctatgggggctcatccgagaaaactgggtattccggacgaagcgcgattggtcggtcatggcctgcattattgtgctgcctgtgacggcatgttttataaagataaaacagtggttgttgtgggcggcggcaacagcgcggctgcggatgcactgcttttgtccagaatctgtaaaaaagtcattcttgttcatcggagagatgagctgcgggcaactaaaatttatcatcagcccttgatgcaggcagaaaatgttgaatttcagtggaatcagacggttgagagtgttattgaaagtatagtggcggatgatggtcatgatggtcggcagggacggcgtttcagtggaggaagaaatcatgtgcagataacaggtgtgcgtttaaagaatgcggcaaccggtgagaaacaggaaattgtttgtgatggtatttttgtcagtgtgggcagggagcctgagacacgaatgattgaaaatcaggttgtgttggatgagaatggttacattattgcagacgagtctacaaaaaccaatcttccgggagtgtttgcagtgggcgatatccggacgaaggcgttgcgtcagattgtgacagccactgcggatggcgccaatgcggcgtatgctgtggaggaatatctggcgaataaataggaaccccagggaaataaagactttaaactgctatactggataaaaggtgtagcagtttttttatgattttgtgtagatttttccagattctaagcgtataataaacatgctttgcgtgtaaaaacggatgtagatagagagaggaaagaatttaatggaaaaattaaaacccatgttgtggtccgtgatgaagggctacacaaaagaacagctggtcaaagatattgtggccggcattattgtggcaatcattgcactgccgttgtcgattgccctggccctggcttcaggggtgacgcctgagcgcggtatttatacggcaattacagccggatttgttatttcatttcttggcggaagccgtgtgcagattgcaggaccgacagccgcatttgcgacaattgttgccggtatagccgcagagaatggtatagaaggactggcactggcaacggtgatggccggtattattctgatcattatgggtgtctgtcgaatgggaagcctgatcaaatatattccatatacgatcacaacaggttttacagccggtattgccgttacgatttttattgggcagattaaagattttcttggtctgacagttgtttcggaagaaccgctgatcgagacaatggacaaattagtgggggatattcgttttatcagcaccattaatgtacaggcagtcatcgttggtgcggtatgtctggcgattctgattgtctggccgatgatcaatgagacgattccgccgtcacttctggcagttatcgccggtattgccatggtgaaaggtttacatatgccggtgaatacaatcggtgatttatatacaatttccaatgcactgccggcactgacggtaccggtgtttaattttgatatggtacagaaactgcttccggatgcatttaccattgccatcctggctgcgattgaatccttattgtcatgtgtcgttgcagatggtatgattaactcaaagcatcgttccaatacagaactggtagcccagggcgcgggcaatatcgtttctgcattatttggcggtatccctgccacaggtgccattgcccgtacagcagccaatatcaagaatggcggacgtacaccgattgcaggtatggttcatgcagttgtacttctgttgattcttgttgtgctgatgccttatgcggcactgattccgatgccgacgattgcagcgattttgtttatggtagcctataatatgagcggttggcgtaaatttgtatatttgctgaaaacagcaccaaagagtgatataatagtgcttgtattgacttttggtctgacagttgtatttgatcttgttgttgccattgaggttaatgtggtacttgctgcaatgctgtttatgaagcgcatgagtgaggagacggccgttgaaggctggaagtatgttgaaagtgatgacgatgatcctgacagtattaacttgagggatgtagccaaaaatattcgtgtttatgagttaagtggtccgttattcttcggtgctgccgataagattgctgagattcatgcgaaagatttcaataattgtctgattttgcgtatgcgaagcgtgaatgctattgatgcaacagcgatgcatgcactggaactgctttgggagaaatgtcagaagaagaatgtgacgctgatcttttctcatgtgaatgaacagccgatgtcagcgatgaagaagtcgggactttatgataaggtcggtgctgaaaacttctgtgcgcatattgatgacgcactggaaagaggcgctgagctgggagaatcccgacagtaaaagccgatatttgtctatgcttgtcattattgggtgcagccggaaaacttgcggctgaataatgaccggaaatttattaagaaaaggatggggcagaaatgggaaaattaataatacctgaaaattaccgttcttgcctgagtagttatgagactcaggaagcaatcggtatgattaaaatcctgatgcagaagaaattatgtatggcgttaaagctgaaacgtgtgacagcaccgttatttgttgatccggcttccggtttgaacgatgatctgaacggcgtggagcgaccggtatcttttgatattccggatgcacatatggaagcccaggttgtacattctcttgcaaaatggaagcgtatggcactttataattatgattttcctgtaggcaaaggtctgctgtgtgatatgaatgctattcgtcgtgacgaagaactggacaatttgcattccgcttatgtggatcagtgggactgggaaaaagttatcacagaagaggatagaaacttcgattatctgatgaccactgtgaaccgtattgtggaatccatctgcaataccctggatgaagtgaaatatcagtatgaacatctgcatacagagctttgcagagaagtttcctttatcacatctcaggaactggaagatatgtatccggatctgacaccgaaggaaagagagaatgcctatgccagagagaagaagacgatctttattatgcagatcggtgatcttctgaaatccggcgaacgccatgacggacgtgcaccggactatgatgactggcagttaaatggtgacctgttgttctggcatgaaccattacagtgtgcactggaagtatcttccatgggtatccgtgttgatgcgaagtcccttgatgaacagctgaccaaggccggctgtgatgagagacgtaagctgccgttccatcagctgctgttgtccaacagactgccgctgacaatcggcggcggtatcggccagtccagaatctgtatgctgttgcttcagaaagcccatgtgggtgaagttcaggcatctgtctgggacaaagagacactgcagcagtgtgaatctgccggtatcgaaattctttaattaattccatatttcgcgattttgtcatataaaaggctgcgggagatgccaagctccttcgcggcctttgttttatttcctgcgcatttcttcagtgcattctgaatttcctgtttttcatattcttcttttttagaaaaaagactattagattcagaaggcatcacagatgaagcggaagaagccgttgatgcagatgcagttaaagttgaatcggtgctcaaagcattttcatgtatctgctgtatatgaaattttttcttaagaaagtcaaaatcctgttttgtcaaggtagtgctgtcagacataatgcaggcgcgttcaatagcatgtccgagttcccggacatttccgggccaggaataggtacttaggtactgcagagcacttttggacacgtttttgatctgcagatgatacttttcattaatgcggtgaatcagtgactggcataaaagaggaatgtcttccatacggtctctcaacggcgggatttcaagttcaatcacattgattctgtacagcaaatcttctctgaatttcttttccttgaccatctggtataaatcttgattactgcagcaaataacatgaatatccagagggattggctggacagaaccaattcgttcgacttcatattcctgaagaacacgaagcagcttggactgtgcttcaaggggtaattcttcaatctcatcaaggaggatggtaccatggttggcctgttcaaatttgccggccttaccgccttttattgcaccggaaaacgtacctgtttcatagccgaataattcggattccacaagggtacttggaatggcagcacagttgatcttgataaaagggctgttttttctgtcactggcattgtggatggcggttgcaaatacttctttaccagtgccgctttcaccggttaaaagaataggtgtcggtgtattacagattcgggataaaattttctttaattctataattttatcagagataccgataattgactcaaaaatttcaggtgcctgattaaaaccgtgaagctgtctgtttaggagaatattggattcttccagacgctcaatgcgttcctggaggttttcaatttgaagagctgtattgagcgaactggcagttgccacaccaaggatttcaccatattcatttttgatgggcaggcagttgtagagaactttacggtcatcaacggtttcaaataattggtcatatttggcttcacctgtctgaagggcttcatagagttttgtatttggaatgagttcttctattttcatgccgataatgtcctgcttcttcatgccgaaaaaatcagcgtaaatttggttaatatagacaatacggccatcggtatcaagtaaaatttgaaaatagagggcatcaaatacgtcgtgaagtaatttttctgtattttcataaaggttattccattctacataattcatatcaatgcgcctttcataacaaaaaatgttcgataatctgtacaaatatgtctatatcatacaacaatttctgcatccttgtaaagaaaaaagggaaattttgtcgaaaaatgctgattttggggctgttttggaattggcatggattatgctttatatataggcagatgataactttcggccgatggtttcaactgacagcattaataaaatgaggtatataaaagggagttgtttattatgagaatagcaattatgggtgcgggttctttaggaacgattttaggcgcttatgtgtcaaaagcaggatatgatgttgtactgattgatccttatcaggaacatgtcgatgcattgaacaaagacggtgcacatgtcatcggtactgttgattttgtacagccagtcaaagcgattacaccggatcagatggacggtgtttatgatgttgtgatctatatggcaaaacagacttacaacgatacagctattcctcagatccaggctcatatcgatgacaacagtacagtatgtgtatgtcagaatggtattcctgaatatgcagtcagcgcagtgatcggcacagaaagagttgttggcgcacctgtaggctggggcgcaacattccagggacctggttgttcagcactgacaacaacagagggaagactgaactttacactgggttcattagatggtccaatcaatgatcacgtaaagagagttaaaccgattcttgaatctatgggtgaagttattgtttcagaaaaccttctgggtctgagatggacaaagcttctgatgaattctacattcagcggtttatcaacagcgcttggaacaacattcggcggggtaatggatgatgatgttgcaatgcagctgattttaaaagatggtaaagaatgtctggatgcggcagccaatgcaggtattacacttgagccgtatgaagaatatgatttctaccaggctttcaaacgcggcaatgaagcaacaaatgatgcttcaatcgcactgatccgtgagatctggcagccacattacaagttgacagccagcatggctcaggatttgatgaagggcagaaaatgtgagatttatgatattaatggtgttgtatgtgatacaggcagaaagtacggtattccgacgccggttaatgatcgaatcgtagaagttgttgccggtatccaggatggcaagtatcagtattcacctgaaaatatcaaatattttaaagatctgttataattaaaaaaaataagggggttaaggtatgtcaattgttccttttgtattctggggtgcgtctattttatcaggttttgttatttatgtgagtgttgcaacggttattgagaaatcaggtttaaagagactcggagccaccggtaacctttttacctgtgatcctaaagaagatgataagtaagagaagggggatatggaatgaatatttatttaatcgtatttattgtttactttggtattatcattgcaacatctattatgggctcaaagaaagttgaatctatggaagatttcgcagtcggcggcaataagatggggctgcttcttggtgttggtacatctatggccacatggctttctgttgcatctgttatgggtgtacccggtaatatttattcaagaggtgtgtgtgccattaccggatggattgccggttggttctttgcaacagcagttatgccgatggttgcgtacaagatcaggagaccggctgtaccttgccgtacattcccggaactgattaatcttcgatatgacccgcataatgaaaagagtccgattcgaattttcgtagcggctgttgaattagttggttatttcgtattctcatttatccagattcagggttttggtatcgttctttcaagtatcacaggtatttcctacaatatctgctgtgtggcattcatgattatcctgattttcacatgtatgggtggttttgaatctgttgccagaacagatacggccaatgcaatcctgattctgatcggtgttattgccggtgcagtaactgttatgcatctgacaggcggtattggcaatattgttgaaaactttgtgacaacaacagcacctgctatcgaaggacagcctgctctggaagccggtgttctcggttcttcatggggcgttttcggtgtcagtgccattatttcaacattcctttcaaatgcatttggttccatcgttgcaccacactgggttgcacgtttcatggctccgaagaatgcaaaaacagcagcgctccagatgttctgcgtactgttgctgttaattcctgtatttggctgtctgatcattatcggtatgggcggcaagatgattcttccgacgttaccggtaggtgttacaacagactacatgttccctcagctgattatgaattaccttaatcctgttctgggtgcattagcattaacagccatctgtgcagcagctgtttccacagcaaactctatgctgttacactgttccacatcattagtatatgatatcaagcgtgtgcttcaggataagaaggcttcagcagaaaatgatgataagacaacaaaagaactcagaatgtgggtacttcttttaggtgtattggctgtgcttggtgcgattgcacagttctcacttctggcacagggctttacatatgtatatggtgcattcggttccatgttctttgcaccaatcctgtttggtctgtttgttaagagaatgaatcagcctgcagcatggacatccatgattgtcggtctgattgcttacttatactgtacaatttgcggtgcgcctttaggcttgccaacatttattgtatctgcaggtttatctgttatctcagcaattattgtaatgaatgtgacaaagaaaccacctgtggaaacatatgaagcatttttctttgatgaagtcagcgaagaaacattaagaacaattcataaaatccgtaaagatatctaatcattgtttgcttaaagcatgttcgggtgaaagaggaggatgaagcatatgatattggatgcaaaagaacaatggtatactttggaaaatctggaaaaggttgaacatctgcagctcctccctattgatgcagatgcaattgaaaacggaaaaagatgtctggaaattcctgaaggtgtaaaaagcatcagtgaagatgcagctgcagtttataatatcggttcaattgtatcgaatatcagctatatcctcgatcatcgggaactgcagagaattgagtgggagaagaaacttcgtcagcgccgcttaatcaagatgacatttccgaaggaagccggggcaaccgcatcggaacggtcagcgtatctggtgggaaaggagctgcgtgtacgtcttgtgaaaatgcatcttccggccagtctggaatctgtatctgcggctgcatttccgaggtttcttgaagccattgaggtcgatgaagggaatgcacagtatgcatcggtggacggtgttctcttttcgaaggatttgaaaaaattaattcgatatccgggatatgcaggagatcagtacagtattccggagggaactgaatgcattgcacaggaggctttttcaggctgttatctgaaaaaactaacattgccggcatcgataaagacaattgagagaaatgcttttcgcggtatgagcgggcttgaagaaatggattgccaatcggaagatattgcacttggcacaggcctgttcagcgaaagcaaattagaccagattgactggtggccgtgggatagcattacaaaagctgcgtttatgaacagtagtatcgaacatattaggattccggaaggggtcgaagcgattgaagattatgcttttgcaggctgccggtatgtcagagaaattacagtttccgaaggtgtgaaaagcatcgaaaggaacagcttcaggctgggtatgggatttgacggcaacgtttttctgccgctgcatttgtatccgatgatttatcgttttccgccgttgacaacaattaacgggatgccgaaacggaaaatatcggagagatatttatccggtgaaaactgccgtgaagacagagaagtgatgattgaacagcagttggaactggagacggcactgggcaaattgaatttcatgaatattgcagccagaagatatatccaggcagaattgcagtgcctgaatagcatgatttaatatacagatacatgtgggagtatgatgaaaatgcgtgaagtaaaagatataacagcaatgtcagtggatgagcgtattgcttatgcaaaggcgaacagtccattgacggaagaagaacttcagatgatcaaagaaggttcagcattgacaacagatcgtgcagatcagatggttgagaatgttatcggtgtttattctctgccatacagtattgcaccgggctttgtcattaatggcaaagagatgatagtgccgatggtaggtgaagaaccttatgttaccaaatcaacaacaagcggcgcccgtctggcagctgccaacggcggatttacagccagcacaacagggcctttcatgatcggccagattcagatgctgaatattgaaaatccgaagacagcaaggctgaaaatcctggaagataaacagcgtttaattgaagcagccaataaggtagatccggtgctggtatcatttggcggcggatgcacagatgttgaagtcagaacaattgaaacaatgatcggtccaatggtgatcattcatttgatcatcaatgtatgtgatgccatgggagcccaggccatcaatgccatggttgaagctgcagcaccaattgcagaagaaattacaggcggtaaagccaatctgaaggttttgtctaattatgctatttacagattggccagagcacgtgtatgcatcaaaaaagaggatcttggcggagaagaaaatgtagataaatttgtttctgcctatgcttttgcagctgcagatccattccgtgcggtaacaaataataaaggtgttatgaatggcatgattccggttgttgttgcgacaggcaatgacacaagagctgtagaaagcggcgtccattcttatgcagccagaaatggccgttacagcaccatcaccatctgggaaaagaataataacggagaccttgaggggatgattgaagtaccaatggcagtgggaactgtcggcggcacaaccaaatttcatccagcggcacaggtttcattgaagatgatgggcattacaaaggcagatgatctcgagaaggttatcgtcagtgtcggcctggcagcaaatcttggtgttttatattcattagtaacagttggtttacatggcgactttgaaagtgccagaaaatagaaaagtatatatttgacgttaaggctcgtgagtgagtcataaatcataagagataacagacaggagagattaacaatggcaaagaaaacaattatcacagcagcagtaacaggcgcatggcctaagaaagaaaataatcctaacgtaccgatgacaccatcagaaatcgctgatgacgtatatgcttgctggaaagcaggtgcagccatcgcgcatcttcatatgagagatgacaacggcaacggtacaatggacaagaataaatttatcgaaacagtgaacctgatccatgaaagatatccggactgcgatatcatcctgaacctgacaacatccggcgatatctatgcaacagatgatacacgtcttgaacatgttcagatcttgaaacctgagatggcttcttatgactgcggttccatgaactggttaaatgccagcctgttcattaacagccctgcattccttgagagatgcggtaaactgttccaggaactgaatgttaaacctgagatcgaagctttcgatcctggtatgatcgcaaatgcagcttactatctgaagaaaggtgttctgaaagcaccattacacttccagttctgcatgggctgcgcaaacggtattcctggttccgttaagaaccttgtattcatgaaagaaacaatggatcagctttgcccgggttccacatggtctacattcggtgttggacattccgcaatggaaatcatgtatgcagcagttgctttaggcggccacatccgtgtcggtatggaagacaatgttatgtactctaagggtgttcttgctgacagcaatgcacagttcgttgaaagagctgcccgtgtgatcagagaatacggcaacgaagttgctacaccggctgaagcgcgtgaaatccttggtttaaagtaaaaataaaataaatttggcaggacttttaagtcctatgaacaaaaacactttgtacacttataggcataactgcgaaaaagtgtggcagagtgtttttgtatgcgagaaaatgttattgtatccatggctttttgatagtaaaatgatggagaagagtatattttgaatagaaactttttggaggatacatatgctgacgattgtttatggagatgccgaaaacagcatttataatacaagtgtatattttaaaaattcatatgagtcagaatggtttgattcggagttggcgaaggagatagtcagagatgtagatcattcggatgtgttgagtggtgaatgtattcaaagtcctgttttgggtcagataccgccggaacgtttgtcgggaggcgtaaaaacattgctgttgatgctcaatgagccggacaaaatttttaatgcatctacttgcggagacaattgtgcaaagtggatattggagataggaaaaagacaggatataacaattaatcttagacatatgatggattttggtatgaatacaagattcgatattgttataaaaaatggcggcgaggttgtacattctatgaaagaattaatccctgtagccaatcagtatttaaatgccatgagacaggagcaggactgaatgaagggtgcacatagagtaattgtagaaacgaagaaaataaaatatgattttgttgtaaaaagaaatattacgattctgaccggagacagtggttctggaaaaacggtgttgattgattacattcgtgattatagacgatatggggcagacagcggtgtttttgtgtcttgtgattgtgattgcagaaccttggataacgaagattgggaacgtcaattagaagaaattacaggaagcattgtatttattgatgaaggtaatcgctttttacctacacagaggtttgcagagcttgtacagcaatctgataattattttgtaattgcgacgagggaaaaacttcctatgttgccatatagtattaaagaaatttatggttttcgtgaatctggaaagtttcgacatacaaagcagaagtataatgaaatttatcatttatatggagagatatcaaattcagacagtattgagccggaatatgtcataacagaagattctaattctggttttgattttttttcttcgctatcggctgaaaaacatattaattgtatttcagctaatggaaaatcaaatattatcaaaagattacaggaggaaaagatttgtggaacagtactggttatcgtagatggggcagcttttggatcagaaatgagggatgttagcaaatatctggaagctgaaaaaaatatcgtattgtatgcaccagaatcctttgagtggctgcttctagcgtcaaatacaattccacacttaaatgtatcagctattttggagcagccggaaaattatatagacagtgctaaatatatcagctgggaaagatattttacagatttactcatagatagtacaaaggatagtcccttatggcgatatgccaagaaaaaattaccagctatttattcgtcaccgaaagttataaaaactgtaaagaaagtaatgaaattaattgtttgggattaagttaagcttcaatataaaaaagctgacaggacttttgaactctgggaaagaactctgatccactgatatgcatgatggcataaaagtgcgtcagagttttttgtaaaaaaagataaagaaattgattttgaaggaaggagcttcattgtcgatttcttttttttgtcgcaatattgcgaaaatgcagtggaaagccaaaaaaaatggttatttttatatcagagttgccagtcgcaatataacgactgaggtgcaatgatgcgactaaacggcaatgaaaagggaatataatagccagaagagcaaaaatcagaaataaaatgcattatatatacgataaaaacctgcaaaaatgataaaaattgacaaaaaaggctgcttgtcaacctgttatttatttatttaattggcacagcctttgctttatatttaggcataagaaatacatggtcataacagataaagggaggaaaaagggatgaaacatgaaattcagatgctcagtgaacagttacagaatgtcagactggaagtagaaggtgcaattgcaattgtgacgatggcgcgtccaaaggcaatgaacgctttgaataatcagacattgggcgagttggaaagcctgtttcactatttcaagaaggacaaggatattcttggtgtgatcatcacaggtgagggcaaggcttttgtagccggtgcggatatcagtcagatgaacggttacaatgcagagcagggaagagaatatgccgactatgcgcagtctattttcaacaagatcgaggcccttgagaaaccggttattgcagcggttaatggttatgctctcggcggcggatgcgagctttctatgagctgtgatatccgaatcgcttctgataaggctatttttggtcagccggaagtaaaccttggtgttattccttgctttggcggtacacagcgtctgtcaagactggtgggcacgggtattgccaaagagctgatctacacagccagaaatgtgaaggctgaagaagcaaaatcaatcggtctggtgaataaagttgtacctgcagagtctctgctggatgaagcaaaagctatgatgcagacaattttatccaaggcacctctggcagtcagatatgcgaaggttgctattaatgaaggaattcagatggatctgtatcgcggtcttgaattagaaaaagatgtgtgtgcattaacatttggttcagatgactcaaaagaaggtatgtcagcatttctggaaaaacgtccggctgtttttcaaaataaatagcagtttgcaggaattcggataagagacatgtctgcgaagcagattcgaattctgaatcgggacttacagggagtccttgaatataaagggataaaggggaggaaattatgtcaggagcagaaatactcagtttaattggtattattattggcctggcggtactggtagtacttgttatgaaaggcatcaatatttatgttgttgcatttattgcgagtattatcgtggctgttttcggtcgaatgaatttatatgaagcattaaaaacagattacatggcgtcattcgcatctttcgtccagaattactggttgatattcttaacgggtgcgttgatgggtaagatttatgagatcaccaatggtgcaaaatccattgcccgtgtcattgtcaaattattcggtaagaaatacgcattggtttcgattccgcttgcctgcggtattcttgcctatggtggtgtcagcgtttacgttgtatcatttgcggttttcccgattgcacttgaagttttccatgaagcagatttaccgagaaattatattccggcagcgctttgcttcggatgctctacttttgcgatggtagctcctggtgcgcctcagattcagaatgccattccgtcatctgcagttggcgaagacttgatggcaggtatggttgttggtttcatttcctgtggtgtcattctggttgtgggctgttttgctctgatgcgtatggttgcagcacagaaggccaaaggtgcatcattcattgctaaaccgatggatatattcagcgatgaagatacaaagctgccgcatccgctggttgcttttattccattaattgtcacaattattctgattaatgtgaagattaacggacaggttatctgtcagcttgagacaggtgttctggcaggttctgttctggcactgatcatgatgtggaaatatcaggatccgagcaaattgctgggacatgtaggtgacacatgcaaatcttctttaaatgcaatctgcaatacatcagcagttgttgctttcggcggtgttgtcaaactggcaccggctttcgcagcagttgttaatgcgatgttaaatattcctggaccgaagattctgagtcttgcgattgcaacaaccgtactggcaggtatctgcggttctgcatccggtggctgtggtattgcatctccgctgttaggacctgcatttgtcaatatgggtattccggcaggtgttgttgccagaacaatttctatttcttcagcggctctggattcactgccgcataacggttacattgtaacagtctgcaacggtttatgtaatgaaacacataaagactgctataaacctgtatttgtagtcactgtattggtgccatttatcggtacattagttgcagttgcactgttctcaatgttcccgaatttaccataaatataacactaaaaaatacataaagcatataaggtgctgacgactgttcagggctgactccctctatattttgccctgaacagggttaatgggggagtattaaaaataatgatcggaggaaataaaaatgtttaaaccattagaaggtgtcaaagtcatagatttaacttatttcgtagcaggtcctggtgcagcaaagattcttgcagactggggtgcagatgttattaaagtcgaaccgtcttttggtgatccgggacgtggcaccggcggtacaatgaatgatccgacagaaaaggattgcaatcctttctatacagcctataatgccaataagagaggcctttctcttaacctgaaggcacaggaaggtaaggatattctggacaaattgcttgagacagctgatgttttcattacaagttaccgtacaggcgcacttgtcagattaggtctggattatgacacattaagcaagaagcatccacatattatctgggcacagatcaacggatttggtgattttggtccggcgaaggacaatccaggttttgataccgttgctttctgggcaagatccggtgccatgatcgatattgctgagaagaatacatcgccaatcaatccgccaatcggttttggcgatgcaacaacaagctgctcattatccggcggtatctgcgcagcattgtatcagaagcagaaaacaggcaagggatgcaaagttatggtttctctgttctcacaggcaatctggaataacagtgctttgatcgtatccacacagtatggtgatgagtatccgaagacacgtcgcaatgccgtatcgccggtcattgattccttcgagtgttcagacggcaagtggattttcctgagtattcttgaaccggacagatattacaatgctctgatggaaaaatgccttgacagaccagatctgaaggatgatcctcgttttacaccggcagccaacggcaaagccaatgcggaagaattgattgcagttatttctgaagaatttaagaaacatactcaggatgagatggtaagacgtttgacagcagctgatattgcgcatgaaagaattcagcatgtacaggaagttctggatgatcctcaggcactggcgaataaatatgttgtgccggttcagaatctggacggtacatttaccaagcagtccatgtcaccggtaagatttgcggtgaaagaaccgacatgcatcgaagatatcgatccgaccattgagtgtcaggcaccgatggtaggtcagcattccgttgaaatcctcaaagagtacggatatgatgatgcggcaatcgaaaaactgatggcttcaggtgttgtaactgtagacacactgtaacagatgtgcaggaattcgtataatcaataggacttaggcagtatgttgtctgagcagatctaaattccgcagcatgactcgcagacgagtcatgaaactcagatgaacagaaaggatgggaaaacgtatggattttacttacacagaagaacaggaaatggtcagagagcttgcggcaacatttgcaaagaattatgttgcaccgttatcagagcagatggatatagacaatacgatgccgcatcatattgctgagaaaatggctgaacttggttttatgggcattaatgttcctgaggaatacggcggtgccggaatggacgaagtcagcaaagcacttgttatcatggaaattgccaaagttgatgcatctgttgcagaacttcttgcagttcatacactgacaaatgatattttcctgaaacgaggaacagaagaacagaagaagaaatatcttgctttaggcgcatccggaaaagttggtgcatttgcgttaaccgaaccgggagcaggctcagatgccagtgctgcaaagacaaaagcaatctctgatggcgatgattatattatcaacggcacaaaatgttttatcagcaacatgggaccggaagagggtgattatgttgtactgattgccctgacagatccgtcagccggcacaaaaggtatgtctgccattgttgttgacagaaatacacctggtttcagcgtaggaaaacttgagaataaaatgggtctgcgcggtgccaatgtatcggaattaatcttccaggattgccgtgtgccaaagagcaatctccttggcaaagaaggcgaaggcttcaagattgccatggcagcccttgacggcggtcgtatcggtatggcttcacaggcggtaggtattgcagaaggtgcgattgatctggcagttgcttatgccaaagaacgtgttcagtttaagaaaccaatttctgctaatcagggtatccagtggtattttgcagatattgcaacatccacggaagcagcaaagatgttgacactccaggcggctgatctcagacagcgtggacagaatatcggcaagctggctgcaatggccaaatattatgcatccgaaaatgctgttacagtgaccaataaagcactgcagattcatggcggttatggttacatgaaggaatatgccattgaaagaatgtatcgtgatgcgagaatcacaacattgtatgagggtacatcagaagttcagaagatggttatttcaagagccgttttaagctaaaatgaatttgaaatagatgaaataaaacagaaggagtcatatgacattgtttatcagatgttgtatgactcctttttaaattcgtggtataatgaaaaaatatacatcagatgacataaaaaagaggtagtttttgggagggcatgctgaatgaactattataaaaatattgtcagccagattttgaaaatgacatcggatggctttattattacggacacagagggaaatgtccgggagattaataagcagtatgcggactttttcgggaaatccagaagtgagatcataggaaaatccattttgaatattattcccaattccaagatgattgatattgtcaaacataaattttcggaagaggatgcggttcataaatacatagacggcgaggcaaaaggcaacagtgttatcgtcagccgttcttatgttgaagatgaagacggcaatgtggtagccggagtggctcaggttaagttcaaggtacagacattggcggtggcaaagaagctgatgaatgagtacgaagagctggaatattatcgtgaagaatttcagaatcagaacagagtggataatattatcggttcggatccgaagtttcgtgaaatcgtcaaagagtgtctgaaggtggctaaaacggatattccggtgttgttgacaggagagacaggaacaggcaaggaagttatggcgaaggctttgcacaccaatagtcttcgatgcgataagccctttgtcagcatcaattgtgcagctattccatttgaattgttggaatcagaattgtttgggtacatggacggggcttttaccggagccaaaaggggcggcaaaaaaggcaagttccagctggccaacggtgggacgattttcctggatgaaatcggggatatgccgagttctatgcaggccaagctgctgcgtgttcttcaggagaaagaaattgagcctttgggcagtgagaagtctattcctctggatgtcagggtagttgcagccaccagacaggatctggaagccaagatgaaagacggctctttcagggaagatttatattatcgtttaagtgttttcaatattcatattccgccgcttagagagcgaggcggggacagtcttgaactggctgagttttttcttgatgagctgaatcataaatataagacctataagacattttccaaagcagttaaggcctattttctgaaataccaatggccgggcaatgtgcgggaagtcaataacgtggtgcagagtgcctacgccatcagtacggagaatattattgatattaacgatatcccggcaaggatgctgcagcaggagaagccggcgattaatctggataaaaataaaaaatctctggggcagatggtggatgactatgagaaagaagtgattttggaactgctgaaaaagcataaaggcaactgcttggaggcagcaaaagaagcagggatccataagagtaatttttacagaaaactgcagaagtatgggattaaacctgcggaggtagaataaacatggtaaatcagacaaaacaagctctggaggcatcattaaagcacttacttttacagaagcctctggacaaaattacaatcagcgatctgacgaaggactgtggcatcagccgaatggcgttttactatcattttaaggatatttatgatttggtggaatggtcctgcctggaagatgctacacgggcattggcgggcaagaagacttacagtacatggacagaaggattgctgcagatttttgaagttgtttatgagaacaagccgtttattatgaatgcctaccgctgtatcagcagggagcagattgagaattttctgtttcagttgacgtcggatttgatcatgggggttgttaaagagcaggagcaggctgcgaatacgacgatacctgataaagataagcgttttattgcagatttttataaatacagttttgtgggtattatgctggactggattaagcagggcatgaaagaagattacggggaaattgccagaatgatcgcgatcacgctgcacggcggcattgcgaattccatcaggaactttacaaaagcggaggaatgataagttttttatcatttctctttttttgtaaattgaaaagagacaaaatcggtcatactatataggcatcacttaataacagatgaaagacatccaatatcggttgtacacgataccaaacgcaacagagtgtcaatgtgcagctatttgaagaaaggtggttatctatatggctaaaaagaaattaacattaggtatggcagcggctgcggcagcgggcacagcggtttatgtggcgaagaagtctcaggataagaagaatcagaacggcacatcacagaacgacatccgggataaggcaaattctggttggtcattgacacagcataaaataaattccggttggacatttaataagaaagacaacaggaattcagcagtcaacaatagttaccgcaatacagagcgcggcaaatatgagaaaaacagcaagggcatttattataccaatggtaattatgaagcttttgccagaccggaaaagccggagggtgtggacgaaaaacatgcctatatcgtaggcagtggtcttgcttctctggcagcggcatgtttccttgttcgtgacggacagatgccgggagagcatattcatattcttgaagctatggacattgcaggcggggcctgtgacggtatcttcgacccgagccgtggctatatcatgcgtggcggtcgtgaaatggagaatcatttcgaatgtttatgggatcttttccacagtattccatcccttgaaattccaggtgcttcggttctggatgaattttattggctgaataagcatgatccgaactattcgctttgcagagcaacggtgaatcggggcaaagatgcccatacagatggcaaatttaatctcagccagaagggctgcatggaaatcatgaagttgttcatgacgaaggatgaagacctttacgataaaaccattgaggatgttttcgatgatgaagtcttcaattcaacattctggatgtactggcgcaccatgtttgccttcgaaaactggcatagcgcactggaaatgaagctgtatttccagagatttattcatcatattgccggtctgccggatttcagtgctttgaaattcacaagatacaatcagtatgaatctctgatcctgccaatgcagaaatatcttgaagatgccggggttgatttccagtttaatacagaagtgacgaatgttgtcttcaagtttgagaatggaaagaagattgcgtctctgatcgagtgcaaagtcaatggcaaggaaaacggcattatgctgacagaaaacgaccttgtatttgttacaaacggcagctgtacagagggaacgatttacggcgatcagaatcatgcgccgaatggtgatgcggaagtcagaacaagcggtgtctggagcctctggaaaaatattgccagacaggacccgtccttcggacatccggagaaattctgctcagatgtggccaagacaaactgggagtccgcaactgtcacaacactagatgataagattattccttatattaccaacatctgcaaacgtgatccgagaacaggcaatgtcgttacaggaggcatcgtcagctgtcaggattccagttggcttctgagctggaccattaaccgacagggacagttcaaagagcaggacaaagataaagtctgcgtatgggtgtatggtctgtttacagatgtaccgggtgattttattaagaaaccgatgaaggattgtacaggtaaggaaatcacagcagaatggctgtatcatctgggcgttccggaagatcagattatggatctggcagaaaacagtgcgatttgcgtgccgaccatgatgccttatatcactgcattctttatgccgagagcaaaaggtgacagaccggatgttatcccggatggctgcgtgaactttgcattccttggacagtttgcagaaacaccgagagatacggttttcaccacagaatattccgtacgtacagcgatggaagccgtgtatggactgctgggtgtagacagaggtgtaccggaggtctggggcagtgtttatgatatccgggaactgttagacagcaccgtgaaactcatggatggcaaatcgccattggatattgaacttccgggaccgctgaatctggtgaagaagcctcttttgaagatgattcatggaacggtagttgaaaaagtactggaagatcatgatattatccgcaaatagtgaatgatgtaataaaaaagactgtcgcttaacgattttcaatcgttaagcgacagccttttttgagggggattgctttgttttgatgatttaagtatatcagaagcccttttgggaggtgttcccggagagtgaaaaaacatgatacttgcattctacataaacagatgctaatatgaagttgatgtaagcaggtagccgattgtataaatttcagctgtataaaaataccgggaggggaatttatataggagcaatagatgcaattaccaaggcttacataagaaaaaacgaagtatttgcggatgccttcaactactttatgtatgatggggctcaggtgattcagccagagtgtttgaaagaattggatccaactgagatagcaatactattgaatgaaaaagatacaaaagataaaaaagcagttcaagtggaggcgcatcagaaatatcgggatattttgaaatcagcagctataatggaggatggtcatacagcatatattcttttggggatagagaatcagaccgatgtgaattatgcaatgccggtaagaaatatgctgtatgatgcgctgcaatatacaaaacaggtgagtgaaattgcggacgttcatcgcaggaaaaaggaaaattcaaatcataagtctgtcagtcatgctgagtttatatcaggattttataagaatgatagattgattccggtgattactctggtaatatattttaatgcaaacgaatgggatggtcctcgttcattgttggatatgatggaaatatcggacccgattgtcagaagatatgcacaggattatcagatacatcttatcaatcctaatcagattgcagatgaagaacttgaaaagtttcaatccagtttaagggaagttatgggttgtatcaaatattctcggagtaaagaaaaattggctgcttttattaataataatccaaggatgaatatggaagctgctgcggccagggtgattgaagcaattaatcatgtgccaattaggatacaggaaggagatggaaagttcaatatgtgtgaagcaattgaagaaatgattaaagatggcagagaagcaggacgcgaagtgggacgtcaggaggggcagaatcgaattaatcaattaattattcttctgtcaaaagagaaccggggcgaggatattatcaaagcggctgaagatagagaatatcaggaacagctgtttaaagagtttaatttgtaaaagtagagtgatttgaaaagaaaaatcactaaaatgcaggaagtaaaatttaagcagaatggttaagctgtttaacaataggaaatttgcttacagaagaaaaggctgccggatggcagcctttttgagtgcatatttaatctctgtattgagcttcaaagcgtaatgtgaccattggggtatgggtgaaagccccataattaagtaccttcagctctgtgatattggttgaaatctgtgaccagttaaactggcaaagcatttctcgtttgacagcttccggtgttgtaaagcctgttgcctgctttgtttcaaaatgcatacattcataggaaccatcccctctgtcctgaaattcgctgccgaatgtgatgttatttttctttaaatatacatcctcaatctggaaagagacagagcaggtggaagcgttgatttttcttaccataactaatacctgaagtttcatccagggacagcgtttggcaataaggaatacaatctgttccatctgatttaagattgaactgtaggaacctgtccgactgacggtgcagtgtaatggggcatctgttttgactttcgtgtcggctgaagtcttgtttccgctgtttgaaaaaataataaaaataataatcgctgcaataatgatccacataaatataatctccttttctttaagtgcctgttttcttttgatgtaatcagtatatcagaggcctttaggggagccgttcccggatggtgaaaaaatcgcagtcagcatttggagaaggagacgccttttcgggaggtgctttttatcagaaaatcttaaggggcctataattgaaataaggctaccgcaatcccactggctttagacggtgggttaaggtagtcaaaagttagatattattgtatacttatggcagggaaacatggaaaactaaaaacaggtacaaatacttattacgatattatatgtatcagaaaaaaggctaaaaaggtatatagaaaccaaaggttaaggcggtggcagcagatgttaaaagcatataaatacagaatatatcccactaatgagcagaaagaacagatagnnnnnnnnnncgtgtataatcggacactggcgtatcgaaaagaagcatatgagaaagagaaaaaaactgtaaataaaaccaactgcaacaattactgtaaccaggttctaaaaaaggaatatggatggctaaaagaagtagataagtttgcccttacgaatgcaatttataatatggacgctgcctatcaaaaattttttaaagaacatacagggtatccgaagtttaagagtaaacatgacggtcataaatcatatacaacgaattttaccaatgggaatataacggcagattttgacagaggaaaagtaaagctgcctaaactaaaggaagtaaaagcaaaactgcatagaaattttagcggacagataaagtctgcagaggaaaagtaaagctgcctaaactaaaggaagtaaaagcaaaactgcatagaaattttagcggacagataaagtctgcaacagtatcgcagatgccaggcggaaaatattatgtatcaattttggtggaaacggaacatgtggaactgccacatacagatcaaaacacaggaatagatgcttatagtgataggtaatcctttgaagttatcgccggattttcccccactccacaccggacgtgcgactttcaccgcatccggcgttccatcggttgttttcacaagcatttaatcaatcaccaaatgaaatgttagttttctattgcggacaaaccagcctgctggcgcagactgttcacttttaacatcagttcctttgttgccttgagcgtgtcggctatctcttttagctcattcttaggacactcttgcaggagtggaagaaatctattatggaacaaaatcatatttcgatagcgttccttgccgcccaattctgccggtgttttcagccagcatactatgtcagccgcattttcaaagagttccccacttagcgcacattttccacgttgagccgagaatagtgaaatcctgctgtcagtaagttctgtgcttcgccccatagacggttgattcctcaaacctgatagaacagatgagttcatacttaggttcgtgtgtatcaatgcccgtccctctaccgtgtaactgcaaaccgccgctttctttgccatcggtatcttgttcttgatgtatgcgatagggtagataggttggtcgattccagatacataccgtatcattgccgactttccaaatcgttctttttcgctctcggtcattgcgccgccctctcgaacaagtctgcacccggtttctgtattgagccgatttgttaaaactgtcatgacctgtctgtggattttcctgcaatcaatgctgatgcaggtggcaagttgaaaataattctgtattcccagaaccattgaattgtacagccgtatttcgtccaaaggtctttttccctctgaaggtcgggcaattcgtttcgcctgttccaccagtttttgcctttccagttccaactttttgtcacagatatgagattgcacgatgtacttcctgcttttcggtctgactcgtatcttaaacccaagaaactctgaatagcgttttctaacattgactatccttgttttctctggcgatacctccaacctcagcctctcggttatccatgccgttacagcctctttcgttctcaaagcgtcctctttattccggcagaaaattctgaaatcatctgcatatctcacgatatacatttctttcaaccctgttttcctcattttgaggaatgccttgctccggtcaaaagtaatcgagtttctgattttcctctcatacccgtattcctttacaagagggtggttctgccattggctctcaacccatttgtccagttcattcagcacgatattggcaagcaacggtgaaatgataccgccttgcggagtgcctttgtctggaatgagtgtagtgccgtctggcattctaatcggtgctttcagaatccgcttgataataaaaatcaactgtttgtcgtgtattcccattgcccatatttgccgcattagcttgctgtgatttacgttgtcgaaaaatccttttatatcaaactcaatcacataatgcaggttcatgcgttgaagcatggtgtaagttttctgcacggcgtgttccacggaacggttcgggcgaaagccgtaactgttgtcgctgaatttcgcttcgcagattggctctatgacctgtttgatacattgctgtaccagcctgtcccagatacagggaatacctaacggtctggtttttccgtttggtttcggaatgtctttgcgtcttaccggctttgggcggtatccgtgctgacttcctgtgacaataaacctcactttctctgcaactgtttcgggcggtaaacacccgatgtcactgatgtttttgttgtctgttcctgctgtgtagcttcctccgtttgctttgatgttccgatatgccagaagaatgttgtcccggctcagaattaaatccataaggtcggtaaaattttctccctccaaacttcgatgatagagttcatcaaaaactggctgcataccgtaatactcggcatgacgtaagtcatctacacatagagttttgtttttctttggcataaggcatcacctcctttttgcgaaagtgacccttttggtcttactcgaatccttatgttggattgaataatgcctgcttatctcaaccgacttgtggccattcctccgtagctcacataacgcaagcacatcataggttcgaccactacttttcagcagcagttcgtctgcttattgtttttcgtcagactattccttgcggaatctgctgcctttcctcgttccgatagttctatctgttcatacatacccataggttcctgctatagacctgtcggcttgcctgtgcctgtaacacagcatggtcgttcgtaggatcaatttctactaaaccacaccgactgcgcattaacgcacccacacatttctgcgtggtcttcttttagacctgtacattcgcaggttcgtcagtccgcccgccaaagcgaacattctaaccataggtatcttatagactctcggcttataggtaacacagtctgcctccagaccgctttcgaccactttaggcagtggttacggtttttgtcagatttaacgctacttttgttttgaccttggtaaggtcttttggtactggtacatacgccatggtatgcgctcctttcctgcccgctaatgggcattgaatattgatttgctaaggcttccggtcttgaataatgaaaatgcaagaatcacggtataagccgctactgaaaacattgctgcatgaaggtcactggatatggtcattgcatttactaaaactgcataaattcccacacagaccatcatgaagaatccctgaaatgccagtgcgaacaagccttttaaatagttgtttccgatattgcagccaaatgtctttgctatctgttctttctgctcattagtgggatatattctgtatttatatgcttttaacatctgctaccaccgccttaaccttgggtttctatatacctttttagtcttttttctgatacatgtgatattgtaataagtctttgtgcctgtttttagatttccatgtccccgtgccataagtatacaataatatctaacttttggctaccttaacccaccgtctaaagccagtgggattgcggtagcctcatttcaaaatacattgctgatgaaaatttccagacctataccgatcaaaatcacaccgcccaatatctgcgctttgcctgccagctttattccgaatttacggccaatgaacagccctccaatacagataagaaatgtgacagctgcaatgatcagggaacagaccagagccatcagccagtcatattcagcaatcgtaaatcctacggacagtgcgtcaatggatgtggctaccccctggaccatcaatgcccagaagcccacgccggtttcctcctcctcactgtccctgggacagacactctcatagatcatatgtccgccgatatatcccaacaagataagtgcgatccacggaataaatttttcaaatgctgaaaagtattctacgatcatatggacacatatccacccgaccatcggcatcaacgcctgaaatacaccgaaagtcccagcaatccccagcatctttctcttcttcatatgcggctcattcaaaccattcgccatggacacagaaaaagcatccatcgcaagtcctacacccagcaaaatactattgaccacaaaagccaaactccagctcatactaacctcccaatttttctcttaattaatcctatgacgacataaaaaaagtatagtccatcgactatacctgtcatttattctgtattcacacaagacgcacgtatagcctgtcagttatacatgagtctcgctatttaaaacaagccaggccaatggccagtatgttgacttgttacgctaaaaaacgcgcctgctactccctcatctcttataaaactaaaaaaacacaatcctgcaccgaccgaagtggaacgaagatacgaaccgttcgagtccggcaggactcttgcatatatatcggttctaacctctttctgattgagcgcgagacggtgcacgacatccggtggatgtcggttctgcaccgaccggagcagagcggagacctcgaacgttcgagtccggcaggactcgtttatatacaaaaggtatccttttaggataccttttgtatataagaagagcgcgagacgggactcgaacccgcgaccccgaccttggcaaggtcgtgctccaccaactgagccactcgcgcataataaataaaatattcattttcaaagcaggtgatgggaatcgaacccacgtattcagcttggaaggctgatgttctaccattgaactacacctgcgtgcccagaaccggaatcgaaccagtgacacgaggattttcagtcctctgctctaccgactgagctatctgggcttaccgtcgctcgtttgcaccagcgacgctattaataataccttatagtgaaagatttgtcaacagttttttttaagttttttatattttcagcagtgccatcaattcatcctttgtcaacgcagacagaccgcccatctcaccgctgaggatctcatctgccagctgcttcttcgcttcctgcatttcaaggattttctcctcaatagaatttttgacaattaatttatacacagtaacaatattcttctgcccaattcggtgtgccctgtctgttgcctgattctgcaccgccagattccaccatggatcataatgaatgaccacatccgccccggtcagattcagtccggttccgcctgccttcagtgaaatcaaaaatacaggcacggttccctcattaaaatcacgtaccaactcaattcgtttctccttggctgtctcgccggtgatcttataccattcaatatgggccgctttcaaatcctgttccagcaattccagcatcgatgtaaactgtgaaaaaatcagcatacgatggccgccttcaatagcctggctaatcagttccatacaagcttcacgtttggctgaaccgccgtcatacgcctcataaagcagtgacggatcacagcacacctgtctgagtctcgtcagctcagcaaaaatcttcagtttattctgaacaaattccgcatccgcctgttcctccagcatagcctgcatatgaacaacctgtccgtcatataacttctgctgttttgtatcaaaagccgcataacatactttttccagtttgtccggcagatctttcagcacatctttcttcagacgccgcataataaagggcgctgtcatccttctgagattgtccgaaacctgcttgtcctgatttttgacgatcggcatttcaacattctttttgaaatcttcatatgtatacaggaatcccggcatcagataatcaaaaatactccacagttcacttaaacggttctcaatcggcgtaccggtcagcgcataccgaacctgactatggatcaacttcaccgcttttgccgcagccgttgtatgatttttaatgtactgtgcctcatccagtacctgcccccggaactgacaaccttcatattcatggatatcccgtttcagcaaatcataagaagtgatcagaacatcccactcctgataacggctgattttctcttttcgctctttctgtgttccagtcagcgtctcggcatttaacgcaggtgcaaaacgtgccagttcttctttccagttataaacaagagaagccggacatacaaccagagaggtgcctttttgtccctcccgtttccatgccagaaataccgcaatcatctgaagtgtcttgccgagacccatatcatccgccagaatgccgccgaaaccgccactttcaaccgtacgcagccacttatacccctctgtctgatattggcgcatcgtatcctgaagcgtttccggtacttcataatctgaatccgtcaccgtcttaaaatctttgaccagctttctgaaatgactgtctcttttcagataaataccgctgctttgctccagcattttgtccagatacagcgcccggtaaaccggcagctgcatctttccctgcacaaattcctttggtgacaaatgcaatgcatccatcatctgtccgaggatttccacactatcctcttcaatattaacaaaatcaccgtttttcagacgaaaatattttttctttctgcgatagctcttcaaaacctccaaaagctcttcattggtcatgtcatccagcgtaatagacaaatccatcaatccgctttccatggaaacacccacagataccttcggcatccgtcgaatactgagtcgtttaaaacgatctgtactgttgacttcccccaaagtcatcaatgcttcaattccctgatccagaacctgataaatcagtgcttcttcccgtccgcaatgaaaaaccgatccgctctcatctacttcagggaaatactgcatcacctgatccataatctcatgttccttaaaaagatcacgaaaatcctctgccgaacccccacgacatgtcacatctacagtgttctcaccataaacggccttaatctcgcaggtcaggttttcttcatccgcatccagataaaaagcaaactttgcttccggcggcagatacttcaggatatccctgctttcagcaccttttacgctgccatacttcttaaattcaggcagaaaccgatagtaaaaatctgcaagatgctttctgccgatattaaattgaatttccccgctgtcattcgacatattatatagaggcagtagaccttctatagcttcccgctctgttctgcacagcactattttttcacgatgattttcaaggaaataaacagcctctgttccctccatgacttcgtttattttgcatgaaacatgaatgccgtcaaattgatttcctgcatccgccagccggctcactgtcattgtcattttcggcacgccatctgcacattcaagataaactttctttctgccttgtgacgtccatttgaaacattctggctttctgtccctgatcaaactataaatctggtcaagaccggttccagacaaatcaatattccctttaatttcttcttccatcgaatagtaactgcgtgtccgatcgcggcgcattctctgctgctgctctttaatctgtcttttaataaaagcataatacttctcagaagtctcttccaaccggcagccggcaaaattgatccttgttgttttaccgaaagctactgtatctccgcgctccatctgcccgacaaactccgtcagatctttgatcacatacattttccctgtgccaaccttgaaagataccgccaggccacctgacagacactcaaaccttggttccagataaagcgtttgcttgtcagaaacggacgtatttgaactgtttttgacatatctttgctgataaacccccagaatctgctttcctcgcaaatctgtcgcatcccccggtctgtgtgcgatcagataatcttccatgagatacataagcgctgcctcatggacacaaacattgccataactatacgctctatatccctctccgggagccgtataagatcctctgcatcctctgacataacacagtgcctgttcaacacgatccttagagcaaaggacctgaaccgcataaccatcatttccttttgtaagatatctgccctctgcatgcagaataagcttcgaatcaccgtaccagcccaaataccccgtttgaatatcatcaaggacaatctgcttttgctctgccagtcttttggccttctcccatatactccttgacaattccagtttttgagcagccatattcagatcaaaataattatattccgtctgggctgccaactttttgaaaatgactttatcttccttatccattctctgctgtgccagctctaattctgtctgaacatcattttccttttgatctgcttccaccgcatacaaaagcgccgccatatgtttgcaattctggccgttatatgcataaaggcatgaacactccatgtcttcaatatctccgtcttctcctatctgggcgatgacattgtagctcctgctgcctttaacagccgcaaaccattcgtgatcacgatgtgtcagccccttgactcttccctcatggtaatactgtcttccccttgaaagaatggtgctgttaaaatactttttccagtccgtcatttttatactttcttccacctcttattatctcttaccttaaccaactgtcagcttctaccaggctgctacagcgccgccggctcttggttctgttgccccggtcagtatgccattctcatctctgaagatcaactgtccccggccaaaatccatgctgtctgtggccaccgtcacatgatgtcctctggcttttaatcgacctgccatatccatcggaaagccctgttcaatctcaatattcatatcacctgtccactgccatctcggggcatccagtgcctcctggggattcatatgaaaatctatgagattcatcatcacctgtacatgcccctgaggctgcataaaaccgcccatgacaccaaaagggccgatggctttgccatttctggtcagaaatcccgggataatggtatgataggttttcttatgcggaccgacacaattggcactttccgggtccatataaaaattgaatcctctattctgaagtgcaatgcctgttttcggcactacaatccctgaaccgaaattgcagtaattagactgaataaaactgaccatattgcctgcgccgtccgctgtgcacagataaatcgtaccgccgctggcaggattcccgtactgcggtttggctgcacgctgaccaatattggccgcacggtaagcagcatagactttcgacagcatttgctccgtcgttactttcatacttcggggatctgcaatatactgctgcccatccgaataggccagtttcatggcctccaactgcctgtgaaccacttcttcactgtcatggccggccacaaactgcatacattccatgatattcaaagccatcagtgcaacaatgccgtgaccgttcggcggtatttcccacacatcataacctctgtaggaagtgctcactggctgtacccattcggcctcataggctaccagatccccttttctcaaataaccgccagttgtccttgaatagctgtctatttcatccgccaggcggcctctgtacaggctctcgcaatccgttgccgctaattccctgaatgtctccgcatgggctttggatgaccagatctctccggcccggggtgtatgaccatccggggcaaagactttcctccattcctcaaacaattcaggtgaaaggctttcttcataatcatcccatgcctgacgccacattttggagatcaccggcgtcaccacatagccctcctccgcatagcaaatcgccggttcaaagatcttctcccaggataatgttccgaaccggtcatgcagtttcttccatccggaaacagctcccgggactgtcacaggttcccagccgaacttcggcatctgttcatagcctttatccatcaacgcctctctcgtcagcaaagccggcgaaaaaccgctggcattaagtccataaagcttcccgtccatccagacctgtgcaaaagcatcactgccgaagccattggatgtaggctccagcacgatcatgcaggctgccgtggccaacgccgcatccaccgcattgcctccggccttgataatatccagtccggcctgagccgccaacgactgagatgtacagaccatgccctttcgcccgtagactacctcccgcctggatgggtacttataattcaaaacatcataacagaaattcacgaaaatccatcctttcgtttcacggtaatggcaccttctcagtcttttaaagccatcaaaaatgctttatattctgcaattacctgtgaatcaaactaacacaattatcaagctatgcccaaaatttctctgcatatagtcccattataccgtccatatactgttctgacaacaaatgaattcgtaaaaaaagaacaccgtacatgcaatcaatacactattatgtaccgatatcaatgtaagcgatgttcttaaagttttcgtaactgttcagagccaacctccaaaatcctacgcatcttatacatgttttttgaaattttgcctggctctgaacagttacaaattttctatataatatccagcactgacttcatcagcaatcttgtatatggatgttctgctttctcatacattttcctgcctcccggcaattcttccactaactgtccatcatgcaggacacagacccgatcacagataccgcctaccagtgcaagatcatgggaaataaaaagcattgccatccccatctcttttttcagtgaaaataaaagctgcataatttgtgcctgaatcgacacatccaatgcacttgtcacttcatcgcaaataagtagcctcggtgatcgaataatcgcacgcccaatagctgccctctggcactctccaccactcagctctctgcatttcttttgatagtaagatgcggatagtcccacaagatgcatggtctccaacaccttctcttttaactttttctgatctgaagctaatcctcgactgtaatatcgaataccttctgcaataccttctcctacacacatattaggcgggaaagactgccagggattctgaaataccacctgtatatccctatacaaatcatgccgttccttttttgacatgtctgccaattctttttcattagacatcaaatggatacttccttcataccctgtcagaaaatttcctatcaatgagccaattgtacttttaccactgccgctctctccaatcaggccaaggcactccccttcatcaatatcaaaagaaacattcaatacagcctttttctgtccacaattttctctataactataactgagatttctaatttctgctattttcatatctcctatgccctttacgccattaatgcccaatgtgtctcagaataccagactttgttcttccaacctttcatctgcggtgtttcctgatattgcggaagaatgccattcatggtcggaatcgcacgaatcaattctctggtatatggatgctgtggatttttcaacaattctgtctttttgccccattctaccaggtggccatgatgcatcacgccgactttatccgccatatatgcgacaactcccatattatgcgtcaccatcagcattgtcatatgcaatttttgacgcatatccaatatcatatccaatgtttgcttctgtacaaccacatctaaggcactcgtaggctcatcagccagcaaaaacgccggttcattaacaacagccaacgcaatagccacccgctgcgccatgccgccgcttaattcaaaaggatattttgaaagaatggtttccggctccctgaatccaagcattccaagtaggctttttgctgtctgctctgcctcctgcacattgactttcctatgtacattcatagcctcgtaaaactgacgatgaatggtctgagtgggatcaaaagaactctcaggctgctgaaaaaccatagcaatacgggagcctctcagctcccggtattgttttttgttcagttgacacaaattaaccccctgaaaaacaatatttcctttagtaatatgtccttcttcacccaaaaggcccatgatactgcgcaccagagtacttttcccactgccgctctctcccacaatcatcacaatttcttcctgagcaacctgaagatcgacatcatgcagtatttctttttctccgtaattcacataaagctgttcaactgaaagcatatgttttactccgcaatatccaatgtattcgtaatcagataatactcagatggattcacatccacacccgttactttattgttataaacaataagcagctgctggctggcaataaaagcatccgggcaatcatctacaaccttctgagtcagatctttgacgattgcatctctttcagatgtatcaaaggtagtttccagtttttgtgcatctgcatctacatctgaattactgtaatggccataattatcagtgccatctgatacaaacaacatattgatcagatactgagcattacctgttggcgcaagggcataactcaaagctgcaatatcaaagtttccagcctgaagtacatcatccagtacatcataagtctcaatacttaacttaattccaattgcttccagctccggctgcagcatatctgtcatttgcagtaaacctgtgttgtagctgtatgtaaccagttttaattccagaggtttttccggtgtgtaacctgcagcttctaccagtgctttggctgcttctgtatcgtacttatcaacagaaagattaatgccatccgtaccgccataactcaatgtatccggataaatgccataggatggttttgcatatcctgcaaatacaacatctgcatagccttcacgatcaatacacatactgatggctttacgaatattcacatccttcaatgcttctgattcaagattgaactgaaggaactgggatcttgttgatgttgctgcaccaattgtataggtatctgtatcagagaaaagtgaagcacttgctgccggcagctgtgcaatcatatcaatttctccattctgaagtgccatatttaacgcatctacatcatccataattttcagttcaatatgatcaattgccggttctccgccccagtaattgctgtttttgtccatctttacttctgtcatagctgtgaaagcagtcgccacgtaaggtcctgtacatgatgccccaagttcaggatcaatctcactttccgcgtcataaacgccaaacatcggatcacaaagatcattcaaaattgtaggattcgcttctggtgtatgaatcgtcaatatctggccgtcagcctccatggaatcaattttcagtgtactggccgcccgggtattattgctataggttctttcaaaacacttctttacagcttctgcagtaacggcattgccattggaaaatgtgatgccatccttcaatgtgaatacccatgttgtatcatccgtattctcatagctgtcaaccagccatggctgaggtgccagattatcatctaatctgaacaagttctcactaataccataaatggacataatccatccatcccagttgttcgcaggatccagactctctgcgccgaaaaatcctgttgttgcaccggctttcagtgttttctcaccatcaccttcagaaacagcactctcagctgctgtttctgacgcacttgtctccaccgcctttgtttcattgctcccaccattactgccgcaggccacaaggctaaacaccattgctgctgtcacagcaatcgttaataatttctttttcatttgattactccttgttcttttttatataaatttaaaatgttacccttttattacccttcatcaatcacatcacgaagtgcatctcccaataaattgaatataacaactgtaaccaacagcgccagccccggaaatacaatacaccatggcgcctgttggataaatgttttcgcctcgctcatggtggctccccactccgctgttggtctggacggccccagcccaagaaacgataaaccggccatactcagtataaaactgctgacatccagagcagccgtcacaataagcggtgaaaccatattcggcagtatatatttaaaaataattgccgtcggtcctgcaccgcatatttttgctgcccttatatactcagaatctctgattgacaaaaccaggcttcgggacagttttgcataagtgatccaataaacagcccccagagccagcacactgttttttaagcctgttcccagcattccggctactgcaactgccagaataaaattcggaaaagcctgaaaaaccaatgtaatcttcattaatatccgatccacaataccaccggcatatgctgctgtaacaccaactgccgttccgataataaatacagcaagaacagcaagaacagccgcataaagggatgtcgctgcgccataaagaattctgcaggcaacacaccttcccagattatctgtcccaaagatatactctctgcagggtgcctgaaaagcctgacgcacattggtacgaaatggttcatgaatcaaatgcccccgcacgatccatgcgcccagcaaaaggcctgcacaaagtaccatcaaaattatcagtctgaacttgatcatttttttctttttcatttctgtctcctcctgcctgtcctcggatccaacaaaggatacagaaattcaatcagataattgatactcagataaataactgccatccagacaacataactctgtatcaccggatagtctctggctgtaatcgcatctactgccaatttgccgactcccggccatgaaaaaatactctccacaattgttgtaccaccaagcatactgccaaaagatatcccgatcaaagtcactaatgggcctctgcaattacgcagtacgtgtccaaataaaatctgccgttcagacatacctcttgccctgaggccatctatataggatccctgcatttcttttctgataatggctcgcacctgacgtatataccaggctgacaaggtcaatgccaacgtcaaaaccggcataacaagtcctttcagactaagacttccgatcaccggaaataattttatctttaaggacaaaaaatacatcagcaaaagtgccagaaaaaaagacggaagcgaagcaaatagataagtcaccatctggatcaggcgatctgctttgccgcctgcataccacgcacaccaagtacctaaaggaatagaaagcagcattgtaaccccaagtgctgtcactgtcagaataagtgttcctggaatctttgctgtcatttcacttaataccggccgattggacttataagaagtgcccatatcacccttgcataagtccatcagccaatcaccatactgaacaatcatcggtcggtcaagtcccagctcatgccgggtggactgcagcgcttcctcactggcttttaccccctgattattcaatagtatctgtgccggatctcccggagacagataagacaggagaaacgataaaaatgtaatgcctatgatcaacagacaaaagcctcccgccttttttatcaaaaatttcataaatttgccaaaacctttctcctctatctataccatcgcagcctgaagtctcagccgctctgtctgctgtaccggtgctttagtacacgcaaccataaacatcggtgtagaaccattattcactttttcagcctcacaccagacacgctgccacaccttttcatccagctgtatctgtataccatttaattgtttaagaatctgacgatcccattccggacgctgaatgtgactaagcggcacctgacgtgcaattgcctccattgcttcaatgtccgtacacgtatagtcatcatgcattccaagactgctgaccttattgcgatccgcctcatatgcagctcttttctcttcatcaaataaatgatgataccaattggcatcaaaattcaaaagaacgccgccaggcttcaaaacacgcatccattcatagtatgccctatccggatgttccagattccatgttacatttcgactgacaatcatatcaaatgtattatcagcgaaccgaagcgcctgtgcatccatctgataccattcgattttatctgccaggataccggcattattctttgcttttttcagcatttcttctgtataatcaatagctgtcacctgatagccggctcttgataagataattgaaaaaaaacctggtcctgttcctatatccagaattcttatcctttttctttccacttttggcatatgttcttcaatgaccgacaaccagaccggccatttttcacctgccagttcttcaagattcacctgtgaatagccttctgcacgatttgtccaatacttttcaatattctttaataattcatccttcttcatcgacttccccttcaattacgcctctacataaaattaaagtatctgttccgagctaacctccaaaatgctacgcattttatacctgctttttgaaattttgcttggctctgaacagttacaaattaaataatgttgtatttacaaacgtaaaaagctcctgtccaaaaggacaggagcttcatactccactatcatacactgcctgtgcatatatctgttaaaataaatatactggtaactgttcaaagctaacctccaaaatgctacgcatttcgtcggtgtggcgtatccgccaaataattattcgtatgcgtacttcatatacgctagttcatataaatattttactggaaatcacatgctgtgtcaatacatttatatcttctggctatacatcaaatgcataaatctatgctatttcgctgtttcttcagtctgctgagtctctgtcccggattccagaaccgtctccaatgcctccgcaggctcctcgcctttaaccgacacctcaatctcaatagaatccaacatctctgacagtttcttgctggcactctcagcgacaacttctttactgctttcagctgctgcctctgtatccttgactgtttcttccgtctcccgaacgttctcagtctctgcagtatcttcactctctccggtcgcttctgtctctctgaaattcttgttctcttcaaaccactggacttcaaagagcaatgcatcaccattggccagttccaccagatactgattatgatacttaagattcttgccgccatccacttcttctgttgtcggctggcaaactgcactgtaagccttgactccgatggttgtctgctgtacagaattgttgaaaatctggtccatcaccgtctggatgtcttcattcttgatcttcatggccgcgaagaaaaccggctttgaagaaaatgtctgtcctctcagaccaatttcatcataatctcctgtgcgattatattcaaatacggtgtcatcataaatcacactgtaacccaggctgctctcaaacactttcttgttctgtgtactgccttctgtgactttatctgattccacactttcacgcacagtttccggatttgtctccgtctcctgtacagtctctgtcaattcctctgaatcggatgatgtctgcgtatctgcattgccggtatatatcttctcacaccctgtcaaagccaagagcattaccagcagcataaataacatgattctggtatgtcttctcatatactcctcctaatatatcttacagacaaatggaaaagccatccatctgtcctgtctgtgtatcgaatatacagcagattcccgaaaacgtcaagtctttaacaggaatacgggcattattttagaagaagtttatactttgccctgtatctaatagtcactgacgctctctgactctgtcgtatctgaggattcatcctgcatggaaagcttcactctgagaattcggtaaatagattcatccaggcgatcctctgtgatatctcctttcttaactgccttgagtacgccttcgtaggctgcttccaaatcatccggttcaagcagaagatcagccccggcctgaatagccttcaccgctgcatccgctgcaccgtagttcttcacaatggtcttgtcgttcagataatctgtcataacaattcccttaaatccaagatccttgcgaaggacctcgctgatcatcttctcagacaacgaagccggtgtatcatcacctgtcacattcggcacagaaatatgtcccaccataacaaaatccattccctgtgcaatggcattgctgtacggcaggaattccttcttcttcagctcatccagtgaactgttgatcaccggaaaaccggacatgttcgaagatgctgcaccgtatcccgggaaatacttcatagccgcattcacatcttcctcctggatacctcttataacctccagtgccatatcggaaaccgtctgggcatcagtgccaaatgtacgattgccgatgccggtactgttgccggataaaacatccgcaaccggtgccagatcaagattcaatccatatgctgacatcagactgccgatggacttgcctgcttcataggcattggtactgtcatccttgcgtccgatttcagacatggacggtgcaccgctatgtaccgaatttgctgatgatgacgaatagtcactgtcgtcatcactgtagctgttctcgtagtattcatccagattgtcattattgccgagaacagatgcgctgccgccctcttcggctgctgccaggaaaagcggaaggccggatatctcttcactgtaagactgcagattatctgtcatcgtaccgaactggcttgaagaatcaatattatccttcgcaaacacaataccgcccaccggataatcctgtaaagcctgataggtcatatcgcccgcatactgtacagaatccacaccagtcagtgtctccggagaaacaacaaataactgtgccaccttctgctccagtgtcatcttgtcaatgatagccttgattgcttcactgtcaccgccggaattactcttaaatgcctgccatgaatcaccgccgtctgcactgtagctgatggtcgtctcattggtaccgagattctcattgaccactgaacatacatagacgatctcattctcactgatcatctccaaatgattgctgccatttaagtcaaaccatacatccgcggtacatttattccatgtctcacagccatcttctgttttataggcttcatagaatgcactgtccgtgccttctcccagagacttcagcagatatccatgcaccttatcataaaaaatgacactgatgtagttgtcactgccttcttcataaaacggattggtaaacttgaccttaaaatctcttccttcataggtaatagtcttcatctgcttattcatgcgaagcagctcaccatcatacacccagtccgcatcactgtctttggatgcctccgctgcctttgtatcttctttatcagacagactctctttccgatccgatagtgtcgatttcgccgtactgctgtcagacccatgccccttgatcatgaagacgcccagtacagcaatcagaataatcaaaatggttgttgtcactgcaacaagctttttcattctttctcctcctgtcataatatacatagaaaaataataccataatcattacaggaaaaacagctgaattttacaaaaaagtataaaattcagctgtttttgaatacgatttaaagaataagcaaaaggacataaaccactgcgctggcagaaatggcaactgtaaacagactgcctcccgcaagtgccgcaatcacaccggccactacaccggctgccgctgccgggatacagtccactgcaaaaaacactgccgggaaagtcatcgctgcaagtaccgcatatggaatataagtcagaaacgaccgtacaaaacgattggtaatcttcttcttaaaaacgaccagcggcaggacacgcacaagatatgtcaccgcaaacataataaaaagataaatccagtaattatgctgcatgttcggcctcctcttcttctgacaccggataaagcagcgcgcctaccgcggatgctgccaccgcacagataataattgaaaatccgtctgtaatgaatgaaaataccggcacaaaatggatgatgcagctcagcagtaccgccacgcatacaaccacaagaatcggatgttccttccgcatagcaggaataataatggccaggaacatgccgtagatcataatgcccaatgcgttgctgagagttgtcggcaaaatattgccgcagatagcccctacaagggtaccgcctgtccatcctatatacggaagaacggccagaccggtcatatacgcaggtgttacagtcttattcctgctcatagccaccgcaaaaatctcgtccgtattgcagtgacccaggatcagctgctgccaccgtttaaatgtcggatccagcttctgtgacaaagaaatactcatcagcgcataccgcatattaatgaccagttccgtcaccatcatttcaacataggaccccgatgccgctataatcccgatccccgcaaactgtccggatgatgtcaggttcgtcagcgagatcaacacggcttcccaccagctgatgcccgaagcaaccgctgtcagtccaaatgaaaaagagactgagaaataaccaattgcaatcgcaatgccatctctcagtcctctcttaaatgccattaaattcatatctgcaatcctctttcccaaaattccgtgatatctttacaccgttttgtaacagaaagcccggcctgacaaagttaataaaaattaactgtattgagggaacgtcagtccgggcggtgaataattcatcacatattatacttattttaaaccattttccaaaatttgcataattcccaaaaaatatagcttgctatagccatcagctatagcaagctcctttattacgacaacatcatctgccgttattcgatcagatatttttttaaaaattcgaggtatttacggccgatctcgctccggaccgaatctttcattgcgatcgccccgatatggatcgtctcatccaacgccaacggcttacagatcagatccccgccgcccaattcttcaatataaatacctgcactcggtgtatagccgttcaagccgagaatcaggttaaaacatgttgccctgtccgtcacacgaatggacttcttatgctgaaatgtactgaggacctcttccgcaaaataaaaagaattgctctcgccctgttcaaaataaatatacggataaggttccagatcctccatccggatcagatcccgatctgccaggggatgtctcgctgaaataaaaatgtagggcttcgttgtatacatctccgtaaaagtcagattatactccttcaaagtccgcataatgaccttcttgttgaaatctgccagatacaggattcccaactcacttcgaccatttttgacatcctctataatgtcatatgtcttcttctccgaaagtgccagatcatactcatccggcccatattcctgcaccagatcaataaatgccctgaccgcaaagttataatgttgggcagatatatgaaaatactgcttttccggctccttattgaggtacttgtcctcaagcagtacaacctgctcaatgacctgccttgcatacctgagaaattcttctcctttattcgtcacacggatgcctttattattgcggataaacaactgaattcccagatcattctccagatcatgcatggcattggtcaggctgggctgtgaaatatacagcacctttgccgcctcattaatgctccctttctcggcaatggcaatgacatattttaactgctgcagtgtcattttatttcctcatccgtctcttcagctttaccatccacataatattcagacgcctttttagaaacataaatggttgtaatgagatctgtcacaccgctgaaaaggaatccgatgcccacaagacgcatcagccatgccacggttgaaaacggattcagtatgacaattaaaccgataaaaatattcaccgctgatgtcagaccgatccgcacccatgtatcaaatcccattcgtttcagatcgaaagcatgctgcagtttcagaataccgctgaggacaacaccgattcccagaacaacgggcaaaacagaaaccacaagttctgatttcacacaaataaaaataccgatgcagacaatcaccagtcctttgatcaaatcattattgcccgctgccagttccttccttagaaaataaccgatcaggaaaaacgcaccaataatgatcaccagaataccgatcacattggcaatcgtgaccagcgtcagctccggcatcaacaataaaacaagcccgcagatcagcagggccactgcaccgccaatctcctgtactttccaattcttcaacatctttatcactcctcaatattttgcttttattctttgcgcggatattcctgctgataatcatcaaacatctttgacttgcttcgaagctccaggcctctgatgatcagctgtctgatcagatcataaataaccgcaaaaacaggcacgccaatgatcatgccgacaaaaccgaataagccgccgaaaagcaaaatggagaaaagtacccagataccggataatcccgtactgcttccaagaatcttcggcccgatgatattgccgtccacctgctgcaaaatcacaataaaaataacaaacatcagacaggacattggactgaccgtcagcaaaatgatcgccgatggaatagcgccgatgtatggtccgaaaaatggaatgatattcgtcacaccgacaatgacactgatgaggatcgcataaggcagccccatgatcatcattccaatataacaaataccgccgataatagctgaatccaacagcttaccgccaataaatcccgaaaagactctgtccgcaaaacgtatctcttcaataatcttatccgcccaacgctccttaaacagactgtacaacaacagtttgccctgttttttgaattttctgcgtccatacaaaagataaatagccaccaccagaccaatgaacagatccataaaaattcctgccatattgatcatactgtcagataaaccggtgaggatcatattcatatacggaagaatactctcctttaaccatcctgaaagggactctgtgcctgcatctgacaactgcataatataattctggatcacttcattgccttcaaacagatgatccaccatatgactgatactctcgatcatctccggcagtgaccgtgcaatccttgccacactcagtgccaactgcggaagcagcatagccaggactgcatagatgaccaccagacctgtcacaatacttccgatcacactcactgtaacgatcagcttctgccgcttcggatgccagtgtttgttcaaaaaacgctcgtaggtattacacaacggcttcagaacataggcaatgcctgcaccatatataaacggcatcagtatattcaatatcttgccgatcagactttgcagcgcatccattctgaataatataaagaagaacagaatactcaatgccgctgtacagaatacggccagtatcattgccagatattttttaaattcttctttcaacaaattacctcttctttcttataaatgcatccattggatctgacggatctccacaccgctggatctcgcataaagcagcgcatccttcgtaccgcttggtcctttgctgtcatcgtcatagacaatgatcatccgctcactggcatccaccatatagcagtcccgcaaaatataatccgctgcctcatccgcaccatctgatacaaccgtcacacgatccgcggcttcctcaatggcccgaagtctccgaccataatcattctgcaaatgtttgttataatccgcaaagggcttcgcaagctccaagttaatcttcggattcgttttctttttctccaatacaatctcagcggcccatgtgtcaacaccgtcagcaccgccgacaataaaataaaagaatccgtccgctacagccttgttgatttcagcttccagggttgctttcaaatgtatacaggccggatctgactcattctctttccacggaaaataaaaaggcctgtgaccagaaaaagcacatctttttgacataactaaaacctctcttcattggttcagtatatattacccgaagcaaatgcgcaatactaaaaagtgaaaactgttcaccgccacccctggaagcgcaaaaaaagagccatccgacgttatatataatcatcagatgacccttcactggtgttcttctgtacagtacattggactatactcctttcttcagtttcggtttaaaaaattaaaataaactttctggtggtccgtacctccttcttcacttttagacacttggtataaagctacttagaattttggaatcagtcctttctactctcttgagttatttgttaatttcttctgttactttctttttatgctttaattatagcatcatttttgcatttgtcaatatattttgtgtaaatattttaattttctgattttttcagtaccgccatgctgataccaaaaggcacttattcagacaccggcagcaaaatctgccagcatccgagtaagcgcctttattctaaaatcttctccaacgttcttctctgtatttgccctgctcttctacctgtcgcagatacgccagcatagacggaatatcctcattcaatgttcctttcaggataacataattcgatgcatgattggacctgaaaaccgtaccctcggaatccacattctgaagaaacaatttcatctcttccaccacatcctccggattgagaagttccagctccccggaaacaatcttcgaataaaccggtgcctgtggatcgatcatcaatgtcaggaatccaacataatctggcttaatcgcgctgatcagggaagccgatgcaatggcgtgttctctcagccgctgccgtccgccaagaccggaaatcaatgtggccgaacagaaaataccgcatcttttcagcttcctgcccgcttcgatcatctcttcccttgtcacaccctttttgacatcttttaagacctgcggatcaccggactcaattcccatataaaccatatcaaggcctgcggctttcaactgcatcagttcttcctcagacttatgaagaatatcctgcgtcgttccgtaagcagtcactcgctccagattcgggaatttctcccagatatacgtcagaatctgtatcagcatttccgttttcacaatcaatgcgtcaccgtctgccagaaaaatcctgcgaatatggccgccatacagcatcgcagcctcatcaaaatccgccagtatatctgcaaggggtctgatcttaaatttcttgtctttatacatcgtgcagaatgtacaggtgttgtgggcgcagcccacagttacctgcacaatcagactgcgtgcctcactcggtggtctgtaaacagttccttcatattgcatgatgtgccctcctgattcttctttaaatagttcgcatgcgtattattaaataccagtatatcttttatccccaaaataatcaataggcagatgcaagtatttcccgaaaaacaaaaacgccacgtacctgatgactcaaatacatggcgtctataaaatcatggatggaggtggattcgaaccaccgaagcgtgtcgcagcagatttacagtctgtcccctttggccactcgggaatccatccataagtcatttctgaccgctatccatgatatcatattcaattttaaaattcaacccctaaaatttcaccgtatatccgtaccgcgtcaaaatagctatgcaactatccttccatccgacatattgcttatccgttatccgatatccttcaggataacagccgatgtcctcggcatcgctaccatcaaatagccatctgttacaacataaatatccggcacctttgtaaacgactctgccacactcatcagctgctgttccatgcggcttccatctgccacaccaatctgccaaaccggcactgccacattcactgtctcctgtgtattattgacaatgactgcataccgctcattcttatcaaaacggccatagcccaatattccccatgctgtataaagcattttgtaggaaccggtacgcagtgccgtgctgcttttgtggattcgaatggcttctttgtggaattgcagcatctgcttatcttcatgcccccacggataagttcttctattgtccggatccgtccatccgcagacaccggcctcatccccatagtaaacagtcggtgctcccggccacgtcatctgcatgatcacagcctcccgcataacagcatcatggatgccttcttcagctgcctttgcccctttgctctgaattcttccaacctgtccattggttcttgtaaggaatcttgaatgatcgtgattggacaactcattcatggccacatagagagaatcatactcaaagcgtgacatatgatgactcatagcaccttcaaatgtctccggattgcacagcagatcatctcttctctcatcactgtgtttttctacaccggtcaggaaccatgtaatcggctccataaatgcctcatagttcatcacggtatcccattcatccccttcaagccatgaagccggatctgtataattttcagccagaatcaaggcattcggatttgcttctttgactgcttttcggaaacgtttccagaataaatgattatactccggagaataaccgagatccgccgccacatccaaacgccagccatccacattgtaaggcggtgacacccacttctgtccgattctcagaatatattcacacaaactttcagattcttcataattcagcttcggcagtgtatcatgcccccaccagccatcataatccttattatacggccatttttctgaatgaaatttgaaaaagctgcgataagggctcttctcatccacatatgcccccggcgcatagccctcctgtccttcataaatccgctctctgtccatccatttattgaaagaaccgcagtgattgaacacaccgtccagaatcactttcatgcctctgcgatgtacttcctctacaaactgaacaaaaagttcgttgctggcttccagattcttcttattggttacacggcggatatagcggctggcatgacaattgtccatatcgcttttcctcagtacttcccctgcatcatcaacaattctgccaaaatgtggatcaatataatcataatcctgaatgtcatatttatgattggatggtgaaacaaaaatcggattcaggtaaagaacttcaatccccagatcctgcagataatccagcttgtgcataattccctgaagatcgccgccatagaagtgacagacatccatgtcatgcggataagcctgccagtccttctcctgctctgaatgcagcttcacatagctatactcccgatccagcacatcatttgtcggatctccgttacagaaccgatctgtaaaaatctgataaaaaacggcacctttcgcccagtctggcgtcttgaactccggatagaaattgaagttataataatcctgcacaccgtccatcacaccgcgtttattgtacacagctgtccttttgccttcgtcagtttccgctccggtaactgtaaaataataattcgtgccgcactccggataatgaagcatcacttcataataatcaaaccgaccttccgtaaaacatttatgcatatctgctttcatgctgtccgtcacaaccgttaccagttctgcattatccttcgccgtccgaaagcgcagcctgacaccgtaaccggtgccgtcagatgtatataaccgataaaaaggagtcccatccgcaaagaacgcctgtctgttcaaaattctattcattcccttgctcctgtcaaaaaaattgtagtgaaactctcattctggattaatgagagtttcgcagatattgataaaaactgtttccagacattagtcaaaagcattaaaattacttctgaattatgttcagcagtgaactacccattgtctaaagccaatggacttcctgcttcacagacctcgtgacctactatctccacaggcgtaaattcgggcagtccctgccctatatagttattcttnnnnnnnnnnnnnnnnnnnnnnnnnnnnnnnnnnnnnnnnnnnnnnnnnnnnnnnnnnnnnnnnnnnnnnnnnnnnnnnnnnnnnnnnnnnnnnnnnnnnnnnnnnnnnnnnnnnnnnnnnnaggacacgaccattctcttattgataaatcttttatctctgtattttggtatccgcaaaccgaacataactggctgctggcatagaatgtatctatctttatatattttctaccattccactttgccttatattctaactgtcttgtcaactcataccatgaaacatcacttatagcttttgctaaatgatgatctttcaccatgttctgtatctgcagattttccgaaactatcacttggttttcgctgataatctcatgggatatcttgtgcagatagtcttttctgctatttgttattttttcatggcataatgctatcttttttttaatcttgcagtaattttggcttctcttttttttatgcgctaactgtctttgcagctttgccagtttcttttcatatttcctgatggtttttggattttcatatttctttccctttgacaatgaaaatatcccataactggggaaaaatgaatcgcggggcacgcgaggatagcttgtagatacttggctcagtagagtcattgagcaagaagcccccacttcaaaatctgtgatttaagtggtgggagcatgtcactttgtttgatgagtatatgggatttttggatgaatagtcatagagagatggcaattaaaaagcgcacaaattgctgaaaattagtttacgtgacagagggttgttttgtacgtacaattaaattataataaagttacaaggtttctctaaaaaagaggaatcgttattatcatgcgtagcttgacatgaatacattattgaagacggatataaacttaacgggaatgtatattataaatttattatggataacaagtacaaggtaaaattctcagagatattgccaataaataatagtattatgttgtgtcatatctttagccaacaaaaataaaacatacgggagatgtagtatcatggcaatatggatgaaaacaaaatttgacagaggaatgaatatggatataccacatagtcctaatattgcatgtgctatgtatggatttagggaattgggagctgaaataataccatatcattcgcttgatgagatatatgataaagtccagagagaagatattgtactagattacatattacaatgtaatgaaatttttaaaaaattcggcgtggaaccatatgttcctgattatccggaaaaacttactaaatatctgggaagaaaaatatgggaagatacgattgattcaataagtcgtgacgaaaaaaaatggtcagcaggagtgtttgttaaacccaagaaaaacaaggtgtttaccggcaaagttattagtgacatatatgatttagtaggctgtggcaatcattcagaaaactatgaggttatatgtagtgaagcgttaaagataaatgcagaatggagatgctttattatgtacgataagttggttgatgtgagaccatatggtttaattcttgatcccagcagagaaagttatttttaccactatgatgaaaaagtactaaaagaaataatgaatgcgtttagaacctgggaaggcaggcctgcagcatgtagcatggacatatgtgtaactgatgatggcagaacattactggtagaatttaatgatgcatattcattaggatgctacggattaaatgatattcaatacgcaaaatttatatcagccagatggagtcaattactgaatagagaagatgaatataaatttttctaaaggtttgtaaaaaaatttatagggagacgagatatatgctttttaaggaaatgatggaagatgaaagagcagccggacatgcagagggaatggcagctggacgtgcagagggaaattctgttggtatcatatcctctattcttacaattttatcatcaaaaggtaaagttgatgcttcattgcaggaatttgtttcaaatcaaaaggatgaaaagatattaaaacaatggtttacgatggcagcttcggctgattcagtggcagaatttgaatcaatatgggctgagctgtaaaggctcagcctattgacaaaacgaggtattatattgatgaatttgaatatatttgaccgatacttacttatcatcaatatcattgctttggtgatttacggtatcaaggttttagtctataagcatcagacaagagactggtttgagaagctctgcatgttcatagtcttacttggcggttcggcaggaattttgctcatgattattctttttgacagaaaagcagtcaaagagaatatgatgtcaagggtgtttacactttgcatgttggttattcaggctattctattgctgatagtgaaaggctatcatggggatcagattcatattgatttctgggattatttgatgcagcatagaattttgctgatctatctagcggtagtgaatatactgacaatcattgtatttggtgtggataagatgaatgcgaagtccaataggcagagagtgcgaattgtgacattgctgggattggcatttatcggtggttcggtaggtgcgctgattggcatgtatggatttcaccataagacgaagaaagcttattttacagttggggtgccgttgattttgctgatgcaggttgttgtattgttttatgtgatgaatatgggaatattttttggggaggtgtcataatgggaagatttgttaatccggataacagtgcctttcaggtagcactgaattccagaatttatgtagacaaaacgggattgattgcatgtatgaataatatattggattcgacagatgcatatatttgcaacagccgtccacgtcggtttggaaaatcatatgctgcaaatatgcttgcagcgtattatagtaaaggtgcatcatcagaagagatgttttcaaaactggatataggcaaaacaccagattttaaaaggcatctgaataagtatgatgttatccatattgatattcagtggtttttgacgaattgcgacgataaggataaagttgttgggtatattacaaaaatagtattggatgagttgaaagatgtttatcctgatattttgccttcagaggtgttatccttaccggatgctctttcacgtgtaagaaataaaacagggcagaaatttgtcattattattgatgaatgggatgtgttgattcgagatgaagcagcgaataagaaagtacaggatgactatattcggtttcttagaagtatgtttaaaggaatagagccaacaaagtatattcaattggcatatcttacaggtattttgccaattaagaaggaacgaacacaatctgcactgaataattttcgtgagtattcaatgttgaatgcaggaccgttggcttcttatattggttttacagaaaatgaagtaaaagaactttgcagagtgtacaataaagactttacggaagtgaaacgttggtatgatggctatcagttgggggcatatcaggtttataatcctaatgcagtcgtaaatacgatgattgatggaaattttcaaagctactggtcagcaaccgcttcatatgattcaattgtaccattgatcaatatggattttgatggattaaagacatctattattgaaatgttgtcgggggcatcggttgatgtggatgttgcctcatttcaaaatgacatatcgaatattgtaaataaagacgatgtcctcacatacttgattcacatggggtatttggcatattctgcggactccaaaatggcatttgtaccgaatgaagaaatacggcaggagctgcttcgggcaacaagaagaaaacaatggaatgagttgatggtttttcaacgggaatcggaacggttattggacgcaactttagatatggatggaacatcagttgctgaacagatagaaaagatacatgaagagtatgtttcagcgattcaatataataatgaaaattcgctcagcagtgtattggcagttgcttatctcagtgcaatgcaatattattttaagccagtgagagaattgcctacgggcagaggatttgcagattttgtatttattcccaaaccggaatataagaatgattatccggcacttattgtagaattgaagtggaataagagtgccaagagtgctttacagcagataaaggacaagaagtatccaaatgctattaaaaattatacaggggcaattttgcttgtaggaattaattataataaggagaataaaaaacatgagtgtatgatagaaaagatgcacatttgatttaaaaaaggatacaaattgttgtattgttttatgtgatgaatatgggaatgtaacttatgaaatatacaaatgtaacggaaggcgaattcgttgtccgcaataatcgttttacagcggaagtgctgattgggggagtacaggaaacgattcatgtgaaaaacacggggcgtatgaaggaactgctatttcccggagccagggtaacgctgacttgttcagataatccgaatagaaaaacaaaatatgatttaatcagtgtgtataaagaatctttggggtgggtgaatattgacagtcaggccccgaataaagtcgttggtgagtggctggcgggaagagattacacttttattaagccggaatataaatacggtgattcccgcctggatttttatatggagaagaaggatgagaaatatctgatggaagtcaagggatgtacactggaaattgacggcatcggatattttccggatgcacccagcgaacgggcagtccggcatttgcatgaactgatgcatgccgtgaaacaggggtatcattgtatactggccttcgtgatcgccatgcccggggtgacggttgtacggccgaacatgacaacgcatccggcatttggacaggcattatcagaagcgatggcggccggtgtggaggtgtggtatctgccgtgtgagataacagcggacagtatacaaatcaagggcagaaaacgaaaatattactcggttcaggatagactttatcctcacgtagtgatacaatagaagcgtgttttgggatggagatgaatgaggaggtatacatatgcagccaatatatttatcaatccaacaggaagagaccggtgcacagattcggaagctgatgatgaagaacggctacaccgtcagagatgtccagggggctatgggatttgagaatcctcaggctatttacaaatggatatccggcaagtctttgccgagtctcgacaatttccttatattaagccgattactgcatgccagtatcgaagatatcctcgtcgttgacggggatattgttatgtcagcactttttgagaccatagaggacgccgtcagtgaatccggtgaattagcatatgttatttcgctgctaaaagggttttactgacggcgtctttagattataatagaaccatagagcggtcgtgaatgaagaaaagcagtaggccgcagtaagggggatttttttatgcgaattgaaaatttacagaatgacaacagaaaatttatcaaatccatcggcaattttcatgtgctggagtatatgcaggatgccagtgtatcaccgatgaatgccatgaatgaatattttatgagcaagatgaatgtgagaagaagacaggttgtcattgatattgacaagaatcattcagccattatccaggcaggagcaatgcagtggatgggcggtcatgttgaggcaacgtccggcgtcaagggaatcggcgatttgttcggaaaggccatcaaaggggccgtgacaaaggaaacagccgtgaagcctgaatatgtgggagaaggctgtctggtgctggaaccgacgtataagtatattattctggtggatatggcaaaatggggtgcaacaggcatgaccatagaggacggcatgtttcttgcttgtgatgccaatgtgaagaataaagtggttgcaagaaagaatatctcatccgcagttctcggcggtgaaggcctgtttaatctcagtcttcagggagatggtgtggctgcacttgagagcaatgtgccggaggaagagttgatcgaagttgttctggaaaacgatgagctgaaaatcgacggcaatctggcagtctgctggtcatcgaatcttgattttacagtggagagaacaacaaagacgctggttggctcggctgtcagcggcgaaggccttgtgaatgtttacagaggaacaggcagggtcctgatgtgtccggttgcaccgacatcatcactttttgaggcagcgaataccatgagtgcaaaggcagcagccaagaacagcaacacatttggcaaataagcagacagtgtgcgtttgcagggcggcgatggcctatgatcagcagaagatgggagaaactacatatgccaaagggaacgaaccagaagttcaagttatacagacttgcgcagattatgatgaagaaaacggacgaagagcattatatcaccatgccggagatcaaggaggcccttgcagagtatgatattacggcagacagaaagagtctttacaatgacctgagggatttggagatactgggcatagaggtggaaggggaacaggatggcaatcgttatcgctatcatgtggtcaacagaccttttgaattgccggaacttaaacttctggtggatgccattcagtcttccaagttcatcacggagaagaaatctaacagtctgatcaagaagctggaaacaatggtcagtgagtatgatgcccagaaattgcagcgtcaggtctatgtatccggaagaatcaaggccatgaatgagagtatttactacaccgtggatgccattcataatgcgatttcggagaacaagaagattcggtttcagtattttcagtggaatgtgaagaaggaaccccaactgcgtcatggcggggcctggtatcatatcagtccctggggattatcctgggatgatgagaactattatctggtgggatttgattctgaggcaggtctgatcaagcatttcagagttgacaagatgctgaggatcgcgctttccaatgagacccgggagggcagagaacattttaagaaactggatatggctgattatgccagaaaaagtttcggcatgttcggtggtgaagaggaaacggtgaagctgcaggtgagcaatggcctggcaggcgttatcattgaccgcttcggcaaagatgttatgatgattcctgtggatgaggatcatttcaacgtcagtgtggatgtccgtgtcagcaggcagtttctgggctgggtattttcactgggtgaaagtgtcaggattttgggaccggaagctgtggttgatcagatgaaggctgagacacagcgcctgataggacagtatgatataaaataataatgcagtatgctataacacaataataaagcagtaagcacagttaaaaatgtaatattgtacagttaaaaatgtaatattgcgtcttgtcatttgaaaatcttcatgttatactatacacaacatgaagcgaagattgttttcatgcaaatatttgcccaccaattatttggttaagcccatacggacaggcggggcagctgccgattgcggtgagagaccgcattattgatttagttaaaagctaaattttataagtcttttgtctgagaagaaggctcaggattaaacatcacttgtgaaatggtcaataaaacgtaggattagcaaatatttgctggtaggagtaccaacgataggctctggaaatatttttcgtagatatgagagtgaatagacagggtatagcatatagcactaagaatatgaataagacatgaaagacaggtgagttttgcctgtctttttttgtgctatggagtgatgaaatgaacagaaataaacagatgcatgcgccggtgtatgaagcattggagcgcttaaagcgaagaagagtagtcccttttgatgtgccgggacataaaaggggaagaggaaatccggaattggtggaacttctgggagagaaatgtgtcagcctggacgtcaattccatgaagccgttggataatctctgtcatccggtatcagtgatcaaggaagcagaagaacttgcagcagaggcttttcgtgcagcccatgctttttttatggttggcggaacaacatcttctgtgcaaagcatggtactttcctgctgcaaggccggcgacaaaattattttgcccagaaacgtgcataagagtgtgatcaatgctctggtgttatgtggtgcgattccggtttatgtgaatccggaagtggataataagttgggaatatcccttggaatgcaggttgctgaagtagagaaagcaatcaaagagaatccggaagctgtcgcagtactggtgaacaatccgacttattacgggatttgctcggatttgcgtacaattgttcaagtggctcatgcacataagatgcttgtattggtggatgaggcccacggtacgcatttatattttggagaaaatctgccggtctgtgctatggacgccggagcggatatggcatctgtttccatgcataaatccggcggcagcctgacgcagagctctttgctgctgacaggaaagaatgttaattgggagtatgtcagtcagattatcaatctgactcagaccaccagtgcttcctatttgctgatttcaagccttgatatttccaggagaaatctggctctccggggaaaggaatcttttgagaaagtaagccgtatggcagaatatgccagagaagagattaattccatcggtggattttatgcctatggcaaggatatgattaatggcggcagcatttatgattttgatgtgacgaagctgtcagtgtatacaagagatattggactggccggtattgaagtctatgatcttttacgagatgaatatgatatccagattgaactgggtgacattgccaatattctggcgtatatctcgattggtgacagaatacaggacattgagcggctggtgggggctttggcggacatcaagcgcctttatgcgaagaatccggagcagatgccaaatgcggagtatatcaagccgacagtttgcgtatcaccgcaaactgctttttacggcgagaagaaatccgtgccaatccgtgaaacagaaggaatgatctgcagtgagtttgttatgtgctatccgccgggaattccgattctggcgccgggggaaatgattacccgggagattattgattatattatctatgcaaaagaaaaaggctgttccatgcagggcatgcaggatccggcagtggaatcactgtttgtactgacaggaaaatattgatagaaggagggagagcaatggaactgtggttttctgattatcacacagagaaagtcaaggtttccgtcaaggttcaaaaacaattatttggacttcagacagaatttcagagaatcgatgtgtttgattcggatgaattcggccggtttttaagtgctgacggcagcattgtattctctgaaaaggatgagtttatttatgatgaaatgattgtgcacgtgccaatggcggtacatccgcatgtaaaaaatgttctggtgatcggcggcggagacggcggtgtggccagagaattgggctactatgaagaaattgagaaaatcgatgtggtggaaccggatcgggtttttgtggaagtctgcaaagaatttttcccggataatgcctgcggcctgggggataagagagtcagcatttattatgaggacgggttgaagtttctgcgtttaaaacagaatgaatacgatttgattatcaacgatgccattgatccgctgggacataatgccggtctttttacaaaagagttttacggcaactgttatagagcgctgaaagaagacggtatcatggtgtatcagcatggaagtcctttttatgatgaggatgaggaatcctgcagggtgatgcacagaaaggccagtcacagttttccaatcagcagggtatatcaggcacacattccgacttgttcttcgggatactggctttttggttttgcttccaagaaataccatccactggaacatctggatgccaaaagatggaaggaacgtcacattaaaacctggtattatacaaccaatctgcacaaaggagcgtttatgctgccgagatatgtagaagacatgctggaggaagaggaagatcgtaagaaatagagctttctaaagaacagataacaaaggggtcaaaataccttttgaccccaacatcatatgatgaaataaaggaaaagcagaggagattaaaaatgggaagattattaattattggatgcggcggtgttgccggtgtggctattcacaaatgctgtcagaacagcaaaacattttcagaaatctgtattgccagcagaacaaagtcaaaatgtgatgatttgaaggaaaagctggagaaaacgacagagacgaagattacaacggcccaggtggatgcagacaatgtagatgaactgatcgcactgattaaagattatcagccggatgcggttttgaatgtggcattgccgtatcaggatttgacaatcatggatgcttgtctggcatgcaaggtggattatattgacacagccaattatgaaccggaagatacggatgatccacagtggcgtgcaatttatgaaaaacgatgcaaagacgaaggatttacggcatattttgattattcctggcagtgggcttatcaggaaagatttaaagaagccggtattacagcacttctgggcagtggttttgatcctggggttacaagcgtcttcacagcctatgcgctgaagcattattttgatgaaattgataccattgatattctggattgtaatggcggtgatcatggttatccttttgcaacaaatttcaatccggagattaatctgcgtgaagtatctgccaatggttcctattgggaaaatggtcattgggttgagacagagcctatggagattaaacgtgaatatgacttccctcaggttggacagaaagatatgtacctgcttcatcatgaggaaatcgaatcactggccaaaaatgtacccggtgtaaaaagaattcgtttctttatgacttttggacagagctatctgacgcatatgaagtgtctggagaatgtgggaatgctttctacatcaccaattatgtatgaaggcagagaaattgttccgattcagtttttgaaagcactgcttccggatccggcttctttgggacctcgcacggttgggaagaccaatatcggctgtattttcacaggaaagaaggatggaaaagaaaagactatttacatctataatgtatgtgatcatcaggaatgctacaaagaagtgggctctcaggcgatttcttatacaacaggtgtgccggctatgattggtgcagcattggtgctggataaagtatgggataaagatggtgtcttcaatattgaagaatttgacccggatccgtttatggatatgctcaaccagtatggtttgccatgggttgtggatgaaaatccacagacagtagaatgatgtttgagggactgccgacaccctgttatgtagtggatgaaggcagaatccgacacaatcttgaaatcctgcagcagttagaaaaggatacaggctgtcatgttctgctggcacagaaagcattttccatgtacagactttatccaatgatcgggcggtacatcagcggaacaactgccagcggcctgtacgaagccagactgggatatgaagagatgggaaaagaaaatcatgtttttgcaccggcttataaagaagcggatatgcaggaactggtgacgatctgcgatcatattatttttaattcctttgcacagtatgaaaaatataaagatatctgtcaggcaaagggggtcagtgtcggcatccgtgtgaatccccagtgctcgacacaggaaggtcatgaaatttatgacccatgcggttatgcatcgagacttggagtcacaaaagcacagtttccggaagttctcccggaggggattgaaggactacattttcacacattgtgcgaacaaaatgcggatgatcttgtgacaacctttcaggcatttgaagaaaaattcggaaaatatcttcactgtataaagtggctgaatcttggcggcggtcatcatattacaaggaaagattatcagtatgaaacactggtgaaactgattcgctatatccgggatacctatcatgtgacagtttatctggagccaggagaagcagtggcattgaatgccggttatatggtgacagaggtgatggatattgttcataatgatatggatatattgattttggacgtttcagcagcctgtcatatgccggatgtcctggaaatgccatatcgtccgccactgtccggtggatacgaggcaaatcagaaaccgtatacctatcggctttcttctatgacttgcctggcgggagatgtgattggtgattacagttttgaaaagccggttcagattggcgaccgtctggtgtttgaagatatggcaatttattccatggtcaagaataacacctttaacggtatgcctcttccgggcatcgctttgcttcgtgaaaatggaaacacagaaatggtaagaaaattcggctatcaggatttcaaaatgcgtttatagataaaatattatatggttcgtatattaggaataagaaaatgaagaatatcaaaacaattccgtcagcagatggctatcatatgccggcagaatatgcctgtcacaagggatgcatcctgatatggccgcagcgtccgggttcctggaaaaagaatcctgaagcggcagaaaaggctttttgcgctgtgatgcaggcaattgctgaaagtgaggctgtgtatctggcgtgcgggaaggcggcgcttcccagggcaaaggcctttgctgatgaatataacagacaatttcagagggaaatttcagaaaagaagcatttcccggtggttgtatttgaggcggaaaccgatgatgcctgggcaagagacatagggcctacttttgttgtcaaagatgacacagtgcgtggcatcagctggacatttaatgcctggggcggtgaggaagacggcttgtatgcctcatggcagaaagatgatgcttttgcggcagcatttgcaaaaagagaaggctatgtctgttatgatgcctctccctttgtactggaaggtggatctattcacagtgacggtgaagggacagtgatggtgactgagtcatgcctgctgagccggggaagaaatcctcagctttcaaaagcggagatagaggaaaagctgcagcagtttctgggggctgaaaaggttctctggctgccaagaggcatttataatgatgaaacaaatgaacatgtggacaatgtctgtgcttttatcagaccgggagaagtggttctggcctggacagatcgggaagatgatccgcagtatccgctttcgctggcatgtcttcgctatctggaatcccagacagatgccagaggaagaaggataaaagtgcataagcttccgataccggatgtgccggtgtgtgtgacaaaagaggatttggaaggttatgcttttgaagatggtgaagatacgagagaggaaggagaacgtctggcggcttcctatgtgaatttctacttttcaaacggtgcagtggtaatgccggcttttggcggagaaaatatcaaaagtgatcagagagcagcagaaatcatggaaaaactttgcccggaacggaaagtgattactgttgatgccagggatattttgacaggcggaggcaatattcattgtattacacagcagattccatttggaaaagcagaacagggagaataattattaatgagaaatgttaagatagcagctattcagatgcagtgcagtacgaatctgcagaccaaccttgaaaaggccgagaaaatggtacggcaggcagcgggagatggtgcacagatcattttgctgccggaactttttgaacgggaatatttttgccagcagcgcagatatgatttttatcatctggcaaagcctgtggaagaaaacgatgcggtgcagatgggcatgcggctggcaaaggaactcaacgtcgtattgccgatcagcttttatgaacaggatataaacacattatataattccattgcctgtattgatgcggacggcacattgtcgggggtgtatcgtaagacacatattccggatgatcattattatcaggaaaagttttattttacaccggggaataccggcttcaaagtatttgatacccgttacggcaagatagggattggtatatgctgggatcaatggtttccggaaacggccagatgtatggcccttatgggagcagagatactgctttatccgacggcgattggctccgaaccgattcttgaatgtgacagtatgccgcattggagacgctgcatgcagggacatgcggctgccaatctcatgcctgtgattgctgccaatcggataggccgggaagaagtgaccccatctcctgaaaatggcggacagaggtcagcccttgttttctatggctcttcttttatgacagatgaaacaggtggattgaaagcctgcgcgtccagagatcaggaagagattttaaccggtgtgtatgatctggatgatctggctgataaacgtcttgaatggggacttttccgggatcggagaccggagatgtatataaaaataacacaataaaattttttaaaagaactgcttgtttgattttcgatttgttcctgagtatggtatactggtactatctatcaaaaagggctgggcctggttttatgcttaaaggaagaattgtatgatagaaatctatataagcagttctttttttatgagaaaaagaaatcagaaagtgaggaagtataatgaacgaattgtacgaagcgattgagaagaagattaaggcatccggatatcctcgggctatttcaggagccgatgtgtatgatgatatttgtgaccagattgaaggtaaagaaaacggagaatatatattattatcaaaatttgacgaagatgtcgtctttgaatatcatatcaccattcaggatgagaactttaatctgggaattctgacaatgaaaacgccggagggggtttatcaggcagattttgatgaagaatagaagccggatggaaaatatattttatgatggagagagaagatgaaaactaaaagaaaacggatcggtgatttctgtgctaaagggacgaaggaggcggcttgatcatgaggattgttgtcagtgcctgtcttctgggggaaaactgcaaatacagcggcggcaataatgagaataaagcggtgctgaattttgtaaaagaccatgagcttataccggtctgtccggaagtattgggcggactgcctgtgccgagaatgccggcagagatcgtgaatggtgttgtcagatgcagggacggacgatccgtggatgacgcatttaggagcggggctgccaaagcgttgacgattgctttgaaggaaaaagcagatctggccattcttcaatccaggagtccttcctgcggcgtcaaggccgtttatgatggtactttcagtggaaagattattccgggagaaggtgtttttgcagagcttcttcgggaaaacggcatcagagccatagatgctgcggatattgatgcatgaaaaaaggatacatggataattttacctgtgataaataaaggagaggattggaatggcctttgatttcaacgaacaatttgagaagatgatgcgggagtatgatgtgacagaagttgtactgcttggacatatgaatccggatggggatgcagcaggttccgtcatggggctggcacattatatcaaggtgaattatccccagtatacagcatggccttttttgtcagataaactggataaaggcccgaagaaacaggtcatggaggatgagatttttgctccttttgagcgtccgaagttggcgtctgaaaggtatgcggtgattgtctgtgacacagcaactcttaaaaggctcatcggcatgaaatattaccagcgggcagtggtttcgatgatcattgaccatcatgcctctaacgaaggatatggaataatcaatgacataaaggtttcggagtcctgtgcctataacgtttttgaaatattagataaagaaatgctcaaaaaggcggcttcggcaccacacccgaatggggcagattatctgtatatgggcattcttcatgacacaagccgattttcaagatcggatgccgaaattgaggcagcgggttcaaaattgctggcaatgggggccgatcatcgctatgtgatgcggacgatgcaggataagacattggatgatctgatcagacagggagagatccttcgcagagtgaagcgcgtgatggagggaaaagtggcatatgtttatatgtcctatcaggaagcgaagaaactgcatatcagctatgaagatattcatcctatcagcggaatgctcagagattgtgaagatatcgagatgggggtttctatgtatgaggaagcaccgaatatttggcgatgttctttcagatcggatggacaatggataaatgtgaatgagatgatgaaaagttttggtggcggcggacatgcggcggcagccgggcttcgcagagagaccgatcagccggaagtattgcttgagcagctgctggcacagattgaaagcatacaatcgttggggtgatgatattaatcggcattttacttattcggaatgactgtctgagcatcaggtggtgattgtcaatattatggacgttgctttgaagtggaagcagaaagagaactgtaagaaagttcatagaattttaacagaataccggggcaggaaagttgacgtaaaactaaaaaaagagtacaatatgataattgtttagagtattttgaaggctgaatctgaatgatgatgcaatacacaatgaatatacagaaaggaataggatgcctgaacgatgaggcatgatgtgtgataaaatatgaatatttttgaaaagagagaatctgttgtcagatcctattgcagaaagtaccctgtcgtttttaagaaagctttgaatgctgaaatgttttctgaagacggtgagcgatatgttgatttcctggctgtagccggttctatgaattatggtcacaacaatcctgagattaagaaagctgttttggattatctggcagatgacaatattatcaatgcattggatatgtataccagtgccaaagaggaatttttgactgaattcgagagattgatcctcagtccgagaaagctggattataaagttatgtgctgtggaccgacaggtaccaatgcagttgaggcagcgctgaaattggccagaaagaacaagaaacggaccaatgtgattgcttttgcaggtgcttttcatggcatgagtctcggcagtcttgccttgacgacagataagacaagccgtgaaggcggcagtgttccgctgaccaatgtctcatttgttccatatgatggcacatttgattcactggcttatttgcgttgggttctggaggatgaccattcaggtgtagacaagcctgcggcaattattcttgaaaccgttcaggctgagggcggcattaaccctgccagtgtagagtggctgcgcggcattcgtcagatctgtgatgagaacgacattctgatgattgtggatgatattcaggtgggcaacggcagagcaggttatttcttctcctttgagagagcaggcattgttccggatatggttgttatgtccaagtctatttcaggttttggcatgccgatggcactgcttctgatcaaaccggaactggatattttcagaccggcagaacataatggtacattcagaggcaatcagctgtctttcatcggcggtacagccggtatccgatattttacggaacacaagctggatgaagaagtcagacgtaagggtcagatcattgaccagtttattcagaaagagatcctgccaatggatgcaagactggtacatagaggcatcggtatgatctggggtattgatttcaatggcattacgccggagaaagccatcgaggtcattcacaaggcttttgacaatcatctgattctggaagttgcaggccgtcatgacggcgttgtcaagattatgcctccgctgacaattgaggatgacacactgatggaaggccttcagattgtgaagaaatccatcgcagaagtgttgaattaatctatgaatagagtctggatatagaagaaaagctcacagaagaggagagtgtataaacatcgaatatttctgtgagcttttatattattatttcttttatatcgttatttcatttttttcatggtaagataccagtcgagatgttcaatggtattgtctgaactttcaagacgttcctgagcttcttcaattgtcaatggagcccccatgactacagcatctccgggctgccagtttgccggtgtggaataatgcgttttgtcatttaactgcaatgactgtagaatacgtataatttcaggaatatttcgtccggtggacataggatagtacaagatggtacggatcataccctctggatcaataataaacactgcacgaacggtttgtgtatttgcaacagtctggagcataccatattttctggcaacattcatactaatgtctgcaataattgggaaaggaatcttcacttttccttcgttattgaaattcaatgcttcgatacttttgatccagccaagatgagaatgaagtgaatcaatggaaagtccaattagtttggtgttaagtgattcaaaggtttcattcatcctggaaagggcaataaattctgttgtacaaaccggtgtaaagtcagccggatgcgaaaaaaggacaacccaacttcctttataatcggctggaaaatcaattttcccctgagttgtcattgcatgaaattctggtgcatggtcaccaatgagcggcattttgttttcttccataggtcatattaactgcatacaggttgcagttcctcctttctaaaaataaaatccacaataatcaattttattttatcatattttaataaaagtgcagcgataacttgagagaaaatttcttattatgtattatatttataggaaaatacatttgagttattgtttgttttgcatatatccttgacgcaaagtagtaaaaagcatatactgttgtttaaaattagttgagactaatgaatgaaagggggtacttatgaagttttttcatttatcggatttacatatcggattaaaactgatgaacagagatttacgggaagaacagatggatattttgcggcaggtgacagatttagccagagaagaacagccggatgccgtcgtgattgccggggatatctacgacaaggctgttccggcggcagaggcagtggaagtgtttgacagctttataacggaactgaaaagggctgtgccggaggctgagatgatgctcatcagcggcaatcacgacagcggtctgcgcttgaattgcttccgagagattctggatgaacagaaagtacatatgattggactgccgccgagaagggaagaagaatatattgagaaggtgacgcttcaggatgaatttgggccggtaaatttctatcttttgccttttgtcaaaccgtccatggtgaagcagattgtgggcgtggatgagaatggcaataatctgtcctatgatgcgactttgcataaattgattgcaagggaagaagttaatacggcagagagaaatgtgttagtcagtcatcagttttatttgcctgtgggagagaatgcagagtcagttgagagaatggattcggagattcgtactgtgggcaacatcgatgctgttgcgtcagatgtgctggaagcctttgattatgcagcgctgggacatattcataaaccaatgaaagtgggcagcgaattgtatcgttactgcggaacgcctttggcctgctcagtcagtgaagccggacagcaaaagggtgtcattatggtggaaataggtgaaaaagattccaaggcgtcagtaaagataacagtgctgccgctgaaaccgctgcgtgaagtgcggatcatcaaaggcagtcttgaagaagtacttgtacaggcctgcgaggatttcgtgacggtgatcctgacggatagagtcgatttagatattatggatatgcaggacagaatccgaatggcgtttccgtatttgctggaaatccgacgggaagtacttcgaaaagccgattacagtgagcagctgatggcggagaaggaacaggatccttttgaattatgttgttcctttttgaaggatttggatgatgaagagaaaacgattcttcgggatgtgatacataccgtgcagggggtgaaatagatgaagccgattcagctgacaatgcaggcctttgggtcatatgggaagaagacggtgattgattttacaaaaccggatcagaatttatttctgataacgggcgatacaggttccgggaagacgacaatttttgacgctattgtttttgcactttacggagaagccagttctgttgtgaataggaagaacggtgccgaattacagagtcagtttgcagcggcatctgtggagccttttgtggaattggttttttcagaaaaggaaggcagtgaagatgtgcactatacggttcgacgtgtaccgaagcatgtccgccctctgaaaagaggaaccggtctgaaggaagagagcggcagtgtgtcactgattatgtcagacggaaccgaatatccgtcaaaggaaacagacaaaaaactggaagaaattgtcggattgacgaagaaccagtttatgcaggtggcaatgattgctcagggggagtttatggcccttttgcgcgcaaaatccgatgacaagaaagtgattttcagaaaactttttaatacagaactttaccagaatattgtggatgagctggcaaagcgccgtaaggacaaggacaggaagatcgcacagatcaagacagcctgtcagacagaagtgggacatattcttgtgccgaaactggtgacagcggatggtgcagagacggatcaggaacagaatggtgcagcgaatcaaatagcggacgagtgtagagatgcgaataaactgcaggagttaaaagaaagaatccttaaatcagaaaggctttcattgccggatatggaggctttacttcagaccttggtatcagtcagtgaatggacgaaggataaggtgcagcagtcagagtcagagacaagccaattgtataaagtctatctgttgaaaagagatgctgtcacaaaagcagggcagttgctggaacgttacaaggagcttgaggaagctgaaaaggaattgggtgaatgtgaagcaataaagcctttgatgcaggaatggcagcaatgcatgcggcagattgaggatgcctatgatattttgacgctttggaagcaatatcaggaggtcagtggacagcttgaaacagcccgacaggcactcgctgccaatgagcaggcattgccggaacagaaaatggcctgtgaacaggcggcagttcaactgcagcaggcaaagaaagtacaggaacaggcattgatggatttctcggaagtgaaaacccatgtcgaaaatgatttagaagctttttccaaaatggctgaagctaaacggaaggtgttgacggctcaaacaaaagtcgatgaagcaggaaagcaggccagaatagcagaggaaagtctgtcagatcttgaaagtaatgagaaacagtggcagactcaggctgaactgctgtccgatacggatagccgcatgattattttacaaggaaagcagcgagatattaaaggtatcggggcggattttaagagctggaaggatgaagaaaaggattgcttcagccaacagaggtgtgctgaagaagcagacaaggtctatgctgatgctaaagacagatttaataaggagaatacggcttacatacaggcctataatgatttccttgatgcgcaggctggtttccttgcagagaaactgcagcggggagaaccttgcccggtctgtggttcgaccatacatccgcatcctcatcaggcagaaaaatcggcattgaccaaggaagaattgaatatattgtctgagagtgtacgtgaacttcaagaaggacaggcggcggcagcgaaaaaagctggagaggcaaaagcaatgctggatgcaaaggaaaaaaattgcatacaaatttgggaaaaacttcggcagaaagtaattgcatatagccgtgatgagatgggtgagttggacagtgaagagattcaaggtctgattgagacttggaagaaagcgctgaaagatgaagagaaacagctgcagaaagacaaaaagcagctgcagcagctcaaaaaatggctgacgaaagctgccaaggacaaagaagaattgactgcacaaaaaaataaagcagataaaatgttagctgataccaaagccgagctggcggcagctcaggctgagttaaagagtacatttatttctacatattataaatctgaagaagaagccaatcagttcatggagcaggccgagcaaaggaagaagaatgcagaaaagcaatatcatagctgtgataaagttgataaaaaagtacgatcagataaagaaaagacagagctagaaattgcacagcatcgacgcgatattccgaatttgcaggataagagtgataaacgaaaagcagtctatacccagctgatggaggaaaaacagctgacggagcctcaatggaagtgtgtgacagagagttatgataaggcagacagacagcagtttgaagaaaaaatcagacaatatcagagtaagctgagtgcagcaagtaagcagaaggcagtagcagagaaagccattgacggccgtgtgaagccggatatggaacagctttgttctgaacgaaatgtagcagaagcggcatggaaaaaagaacaggctctttatgagcgctatgcagaaatgtataaaaccaatcatcgggtttgtgaagcgttgatgccgaagatggctgaacgaagcaaaatcatggaagaacacagaagactggatgatttgtacaatttgttagcaggcaaagtgacgggagccagaatggatatcgagacgtatgtgcagcgatattaccttgagagaattctgtatgccgccaataggcgtttcggtgaaatgtctgctgggcagtttgaattgcggatgtgtgatatcacgaaggcgggtgaaggaagaaacaggggactggatttgatggtttattccaacgtcaccggcaaggagagggaggttcgcactctttccggcggagagtcgtttatggcggcattgtcgctggcgcttggcatggcagatcagatccagcagagttcatcggccattcatctggatatgatgtttattgacgaaggattcggctcattggacagccaatcaagagatcaggcagttcgggtattgcagcagatggcaggaggatcgaagctgataggtattatttcacatgtgtctgagctgaaacaggaaatagaagaccaactgattgtcagcaaagatgaagagggtagttcagccagatggcagatcagctgacagcaggggcagtgttatgcttatttggacggcaatccggtgaatgtatgtgattaatgatacctatatttatacggggcataacttgaattgacagcaggagtatgttaaaattggattagctatagtaagtttgtgcatcacagatgaaggctgtggtgcattttcatgtatagagacggaatgtacaaaagccgattgccgcacttgttgatgtggatgtaatacagggagataacaaatggatgcagggataaaggagacaaaagaacaggcattaaaggaaatggagctttttaagacggtatttgacggtgtacgtctgctgaatatgcatgcattagaactgatcggaaagggactgggttcctattcccttacagaatcggagcagaagtttgatttctgggagaaagagcatccgtgtgacaacgacagctgtattgtgctgcaggctctgagggataaggacgttcatacgaaactggaatatatcggatctcagttgtacgaagtgaccgcacgctatatggaagtcgaaggagaaccatatgttctggaacttgtcaaacggatggatgataactatatgattgatgagaagcagcgtgagaaactgctgagacatttcggcggttaccatgaacaactgtacaaggatgctttgacaggggcttataacagaaggtattttgaagagaagatccgtaagtcgacggtatcagccggagtagccatgatcgatttggatgatttcaagttgtataatgattcatttggccatgataccggtgatgttgtgctgattacttttgtcaatattatcaaaaactgtacccgaaagacagatatgctgattcgttatggcggtgatgaatttctgctgattatgccgggcatcaaagaacaggatttcaagaacaagctgcttcagatcctggaggaggtccgcagagcagatgtgccggggcatggcggtctgagattgtcagccagcatcggcggtgttttgtcaaacggcagtgtgatcgaggatgctattggaagagcggacaagctgatgtatcaggccaagaatcgcaagaatatggtcgttacggaggataacctggtggcggatggtatcaagaaaggaatgctgcatgaccgtgagaaaatcagacagttgattctgatcgtggatgattcggaactgaatcgggcgctgctgtcagaaatgctgaaggatgatttcagaatcctggaggcttccaacggacgggaatgtctggatgcactggaacagtacggtatgggtatttcacttgttctgctggatatcaatatgccggtgatggatggctttgaagtcctggtccagatgaaccgtaatcactggattgaagatattcctgttgttatgatatccagtgatgatacagcgtccaacattaagcaagcatacgatatgggcgtttctgattatatccgcagaccttttgatgcccaggttgttttccgacgtgtcgtcaatacaatcaaattgtatgcgaagcagcgtcgcctgattactcttgtaacagaccagattgatgagaaagagaagaacaatcagatcatgatccggatattgagccagattgttgagtttcgtaatggtgagagtgggctccatgttgagcacattaacatattaacaggtctgcttctggagcgtcttgttcagaaaacagatcattatgatctgacatggtcagaccagtataggatcacattggcatcagccctgcatgatatcggcaagattggcattgatgacaagattttgaataaaccgggcagattgacgaaagaagaatttgagattatgaagagtcatacgctgatcggcgcatcgattcttgagaatcttggagcgtatcaggaggaaccgttgcttaaggcagcttataaaatctgcagatggcatcatgagcgatacgacggcaaaggttacccggatggcctgcggggagatgaaattccgatttctgcacaggttgtttctgtagcggatgtgtatgatgcgcttgtcagtgaacgtgtctataagaaggcaatctcgcatgagaaggctattgaaatgatcctgaatggtgagtgcggtgtatttaatccgatattgatggagtgtctggtggatatcaaggataagatacataaagagagtcaattggaggtattgagatgacgctaaaagaagcttatgaatctgtagaatcgaattatgataatgtattgaagcgactcggaagtgaagggatgatcaaacgttttgcagttaaattcatcgatgatccgacgttcggagaattgaagaatgcactggcagcaggagatggcgaaagtgctttctaaaatataccccatagaatggacacgataagaagaagggttccttaaaaatggacacaagaagaagggataaaatcctgatataactacggataacatcaatcggtgcaccacccgctgtcaacaggcagaaactttgactccagaatgcttccttccaaagtctttccctgatctgtggatattccttttttaacaaacgactgcttgcacttttatacgcattgataaatttactgagttctgattttggctgtgccggaacggtaacatctgacctgccgttaacggaagtgacagtgggtgtgtatgacacgtctggaaacttgaagacaggaagaaccgtggatccaaacacaacaagctatgacctgagaaatgtggatacaagcgttaagttcggaagcctggggacaggcgggtaccggtataaggtaacgtttttaaagttgtaattgcactgctaaaaaatgccatatacattcaccaaaactgacttctttcaggtgtttacgggaacgaaaatacaccgactaaaaagccggtgcacctagtgtcagttattcctttcctcattattttctgttcattcccaaggttactccgacagttctacatgaattacttccacctcttcttcagatttcggtgtatactgcggatttaactctttctcaactttgtaccggttcttctcgttttcatctgcaagaagccgatagtttttgtgtttcgtgatatcatatttgtccgagaaaaatggtctggcaccacggatctgcaggatacattttcctccatccatgactgcaatctcatcttcagtcatcagctgtttacctgttttctggtaattcaatccaaaagacttctgattactcctcgtctccgaagtgttatacaggtcaatggtttccttacccagaagctcgctcatttcctttaaggtagttttctcttttcctccaagaaatagtgtggtatcacagttacccagaatagtatctgcactatccttatacattgcctttagctgactctgtgactgcaaaataatagaagcagagatttccctgcttcggatggttgcaatcagcttgtcaaactgaggaatttgtccaatattggcaaactcatcagcaatgacacgcacatgaactggcagtcttccaccatattcatcatctgctttgtcacaaagcagattgaaaagctgtgactgtaacatggcaatcacaaagttaaaggttgtatctgtatcggacataatcaaaaacaaggctgtcttcctgtccccaatcttatccagttccatttcatcataagacatgatctcacgaagttctgctatatcaaatggtgccagcctcgcaccacaggaaataagaatacttttggctgttttgccagccgccattttgtattttttatactgtctgaccgcaaagtgctgcggatctctttcttccagttcctggaacatcatatccactggattctggtaagtttcatcctcttcacgggtttcgctttcattcaaaagatccagaagggtattcagattcttttcctcttcatctccttcataccagataaaagcaatcaatgccgtgtacaacagcttctctgcttatagtgataggtaatcctttgaagttatcgccggattttcccccactccacaccggacgtgcgactttcaccgcataggacggaaagaccccatggagctttactctagtttgatactgggacccggtatgacatgtacaggataggtgggaggctgagaattaatgacgccagtcattgaggagccgctgttgggataccacccttgtgatgccaggtttctaacgagctgccgtgaaccggcaggcggacaatgtcagagctgttatctcttcccgttttactttggtttgtgttcttaaaaattctttttaggaattttcgggattgttttattatttagttatcaatgttcttttctcttagtcagtgttttgcaccgaccgttataggatatcatttctttcaaactttgtcaagcacttttttaatttatttttaaaaagttttttcaaagttttctggaaatgttccagcggagaaagagggatttgaaccctcgcgccggttgcccgacctacacccttagcaggggcgcctcttcggcctcttgagtatttctccagtcctcaccgtcattgcagtgagcatttgttattatacaggtactgtaaccttttgtcaacaacttttttaaatttttcgatatttttttgctacgtcttcatataagtaactgccttcgctgtcaatgaccacgattgcaggaagattctccacttccagtttcctgattgcctctgttcctaggtcatcataagcaatcacttctgcctttttaactgctttagataaaagtgcgcctgcccctccgactgctgcaaaataaacagcgccatttctcacaattgcttcccgaacttctgcagaacgctttccttttccgatcataccctttaatccctggtccatgagaagtggtgcatacttatccattctgctgctggttgtcggtccggccgaaccaatcggacgtccttctctggccggtgacggtcccatgtaataaacaatattattcttcaggggcatcggtacttcctgcccattctgaagggcttcatacattctcttatgtgctgcatccctggccgtataaatggtacctgatatatatacataatctccggctttcagcatcttcacttcatcatcatttaatggtgcctttatatgtctgtccatcatcaccgcctcctataattcttttgtcacatgtcgattcacatgacagcatatattaactgctaccggcagtcctgcaatatgcgtcggatatgtctcgatattcactgcaaatgccgtcactgttccgcctaaaccacccggtccgattccaagtcggttcaccttatccaacatctcttcctccaatgcacgtacataaggtacagaggaatgctcacctgctgctcgtgtcaatgcatgcttggccatgatggcacatttttcaaaatcaccaccgacaccaacaccgatcaccatcggcggacaggcattcggtcctgccagatcaactgtctctaaaattactttcttcacaccttctataccatctgccggtttcagcatgacaacgcggctcatattctcgcttccgaatcctttcggtgccaatgtgattctgaatctatcgcccggaacaatagaataatgaatgatagccggtgtgttatcctgagtattcactctttcaatcggatcactgacaacagactttctcagatagccttcaacatatccctgtctgacgccctcattgatggcatcctcaagaccaccatccataatatgtacttcctgcccgatttcaacaaaaacaacagccatacccgtatcctgacaaattgggatcatatcttcccctgcaatcgtcaaattttcgcacaactgctccagaatctgacgtccgagcggagattcttccttctccacacctttgtaaagtgcagacttcatgtcatctgacaaataatgggtggcctgaatacacatttctttgatactgctgataatcgcattacaactgatttctctcatagcttcctccgtaactttttaagcagataaatttattatataatgacgtttttttgatgtcaataagctcaaaaccccttatttccttgcatttcagtgcaacaatcactataataaaattatcgtaactgttcagagcttggctctgaacagttacaaattatctttactaaatctttaacaggagataaaacgatgaatttcaaggaccacatcgaacatttaaaaacattttttaccccatctgtaaaaaatgtcatcttactgatccgctggctgattacggccgtctttacaggccttctcgttggagccgtcggaacacttttttattatgccatgagttttgtgaccggctgccgaaccgctcaccccatactcatttacctgctaccctttgccggtctgctgattatttttctctacagggtaagcggtcagtacaacaataccggaaccaatctggttctgtcctccatccagtcggacaaccatatttctgttaaagtagcacctctaatcttagtatcgacgctgatcacccatctgttcggcggttcagccggtcgtgaaggtgctgccctgcagattggcggaagtctcggtgattttctggctcagacctttcattttgatgaaaaagataagaaactgatgattatgtgcggcatgagtgcctgcttctcagctgtattcggtaccccgatggctgccgcagtattttctatggaagtcatcagcgtcggcattatgcattattctgccttggtaccatgtgttatttcatctctgacagcttccatgctggccagacattttggcgctatgccggaagtttttccgattacggatctcccggctctgacagcccttaccgtcggtcagataattcttgctgcagctgcttttgccgccatcagtgttgtcttctgcattgccctgcatctttccgagcatacatacaaaaaatacattgccaacccgtatcttcgcgtttttgtcggcggtttaattgttgttcttctgacactgcttttacataccaatgattacaatggtgccggcatgccgatgattgctcgctgctttgaaggctctgttccgccatgggcgtttatgatgaagattatttttacagcagctaccctgggtgccggatttaaaggcggtgaaatcgttccttcgttctttatcggtgccactctgggctgtgtaatcggtccaatcctcggtcttcctgctgctctctgcgccggctgcggtatggtcggtgtgttctgcggtgtgaccaacagcccgattacctccttgctgatttccttcgaactgtttggctttgaagggatgccctattatctgattaccattgctgtcagttatatgctgtccggatactacggtctttacagcagtcaaaagattatttattcaaagacgcgaactgaatatatcgatgcgcatacgcattgatcagccattatctccaaaggcagcctacgctttgctttcactgttaataccaaaaacaaagggccgcagcattttttcacgatgctgcggccctttttccacatttctgatttttttcagaggacttatccacaatcagaaccattcatccaactattctgtttcattttcctcagaattatccactgaatcggtctctaaaacttcttctatcatcccggcctcttctgactgttcgtctgaagtctcctcatcgtctttcatatcttcacggatctttgcaatacttgcaactacagagccttcatccagctggatcagtttaacccctgaagtgatacgtttcaaaatagaaatgccttctaccggcatacggataatgataccgccggttgtaatgatcatcagctcatcttctgcgttgacacattttacgcccacaacaagacctgtcttatctgtgatcttatagcatttaaggcccttgccgccgcgattctgaacattaaattcttccagcatggttcgctttccgagacctttttcggatacgataagcactgcttcgccctggctgctgacctgcatgccgacaatcagatcatccgcatccagatccatgccgatcacgcccatagaagtacggcctgttgcacgaacattatcctgcttgaagcagatactcatacccttctgggaaacaagataaatcaaatcagactcatctgttaccttaacttcgatcagttcatcatcttcacgcagaccgatagccagaaggcctgtcttacggacattgatgtattccatgatagacgtcttcttgaccataccgttctttgtagccatgaaaagatatttgtcattctcatatttttcaagcggaatggttgctgttaccttttcacccggctcaagctgcagcagattgatcagtgctgtacctctggcaatacgggatgcctccggaatctcatagcctttcagtctgaatacacggcctttattagtgaagaacagaatataatcatgggtgttcgccatcatcaactctgtaatgcagtcttcatccagcttcgtcatacctttaatgcctcggccaccgcggttctgacttctgaagttatccatggtcatacgtttaatataccccagctgagtcatggcaatgactgtattttcgcgtttgatcagatcttcaacagtaatttcgtcatcatccacacccagggatgtttttctgtcatcaccatatttatcacggataagcttaatttcttcgcggatcacgccgagaagcagtttttcatccgcaaggattgcttttaattcgccgattcgcttcatcagttcattgtattcgttctcaatcttttctctttccagacctgtcaaagctctcagacgcatatcaacgatggcctgagcctgaacctcagtcagaccaaatgtttccatcagccgtgttttggcctctgcaacatttttcgatgaacggataatgctgataacctcatcaatatggtcaagagcaattaataagccctgtaaaatatgtgcacgttcttccgctttatttaattcaaaacgtgttcttcgtgtcacaacttcttcctgatgcttcagatacagttcaagcatctgtttcagattcaggatcatcggctgattattaacaagcgccaacatgatcacaccatacgtatcctgcagctgggtatgtttatacagctggttcagtacaacattcggattagcatcctttttcagttcaatcacgacacgaaggccttcacggctggattcatctcgaagatcagaaataccttcaatccgtttatcttttaccagctcggcaattttttcaatgagttttgccttgttgaccatataaggcagctctgtggctacaatacgatgacggccattcggcattgtctcgatatccgtcactgctcttacttttaatttgccgcggccggtacggtaagcctgattgataccgtttttgccaaggatcatggcacctgtcgggaagtccggtcccttgattatctccatcagttcttcgatggttgtctcacgattttcttccacacgattatcaatgatcttgataacaccgtcaatggtttcacgcaaattgtgcggcggaatatttgtcgccataccaacagcgatacctgttgtaccattcaccagcagatttggatatctggacggcagtacaaccggctctttctctgtctcatcaaagttcggctgaaaatcaacagtgtccttgttgatatctgccatcatttccatggaaattttgctgagacgtgcctcagtgtatcgcatggctgcggcaccgtcgccatccatggagccaaagttgccgtggccatctaccaacggatatcttgttgaccagtcctgagccatattgaccagtgcaccgtagatggatgaatcaccatgcggatgatatttacccattgcatcaccgacaatacgcgcacatttacgatgcggcttgtcaggaccattattcagctctatcattgcgtaaagtattcgtctctgtaccggtttcaaaccgtctcggacatccggcagagcacgggatgcaataacgctcatggcatagtcgatatagaaggtttccattctttccttcagatcgacctcatgaatcttatcgaaaatcttatcgtccattctcttcctccataattcttaacgcagaacctttactatatatccagatttctgacatattttgcattcttctctataaattcacgtctcggctcaactttgtcacccatcaggacactgaatgtctcatcgatgctgactttttcagcatcatccatggaaacacgcatcagaatacgtctttcagggtccatggttgtctcccaaagctgttccgcatccatctcacccaaacctttgtaacgctggatcttgttattctgatcacgaccgatttctgtcaggatcgcgttcaattcatcatcactgtaagcataccattcctttttgtttcgctcaatcttataaagcggcggctttgcaagataaacataaccttcacggatcagatccggcataaagcgataaaggaatgtcagaagcagtgtactgatatgtgcaccatccacatcggcatccgtcatgatgataatcttatgataacgcagcttggtgatatcaaaatcttcatggatacctgtaccaaaagccgtgatcatggctttaatctcattattgacaagaatcttatccagacgtgctttttcgacattcaaaatcttacctctcagaggcagaatggcctgtgtggctcttgaacgtgctgtctttgcagaaccgccggcggaatcaccctcgacaatgtaaatctcacatttcgccggatctttatctgaacagtctgccagtttgcccggaagactcatactgtctaatgcaccttttcttcttgtcaaatctctggcttttcttgctgcatctctggctctctgtgccatgacagatttctccacaatcagcttgccgatggccggattctgctcaagaaatacactaagcttgtcgctgacaatactctcaacggctcctcttgcttcggagttgcccagtttctgctttgtctgaccttcaaactgaggctccccgatcttgatgctgacaatggccgtcaggccttcacggatatcttcacctgtcagactctgttcgttgtctttcaaaagcttattctttctggcataatcattaaatgtcttggtcaatgcacttcgcatacccacaagatgggtaccgccttcaggcgtcgtaatattattgacgaaactgtaaacattttcattgtagccgtcattatgctgaagtgcaacttccacaagtacgccgtctttttcaccttcacagtaaataatctcatcatacagcggtgtattggccttattcagataagccacatactcgcggataccgccttcatagtggaaagaggacaaaattggctcttcctcacggacatctgtcagagagatacgaagtccctttgtcagaaaagcaatttctctcagccgctgtttcagtactttataatcaaaaactgtttcttcaaatatttctttatccggcaggaaatggaccgttgttcctctcttctctgtcggaccgatcttctgcagttcacacatgactttaccgcgttcataacgctgataatattcataaccatctacataaacattgacttcaagccattcggacagggcattaacaaccgatgcaccgacaccatgaagtccgccggataccttatatccgccgccgccgaatttaccgccggcatgaagaatggtaaatacaacttctaccgccggtttatgggctttcgcttgtataccgaccggtataccacgtccgttgtcgacaactgtaatggaattgtctttattaatggtcacctcaatatgatcacagtaaccggcaagggcctcatcgacggaattgtcaacaatctcatataccagatgatgaagtcccttcgctgaggtactgccaatatacatacccggtctctttctaactgcctcaagcccttccaatatctgaatctgacttgcgccgtatccttcactcatatctcaaacctcctgctttatcctactacctcattgacaaaatcaactgttccatccgtcactttaaaaatgcggtctatgttaaatctgtgattgacaaattcgtccaaacccgtacacgtgatcacggtctgaatatctttaatgcagtccagaagataattctgtctggaactatcaagttccgacaaaacatcatccagcaataataccggctcgtccccgatactctgacgcacaagttcaatctcagccagcttcaaggacaatgcagctgtcctctgctgcccctgtgaaccaaatttgcgaatatccacttctccgaccataaacagaaaatcatctctgtgcggtcctgttcctgacattttcatccggatatcctgatctctttttgataacagtacacgctcgaaatcctccggctccgtactcggctgataaacaagccgaagcttttctctgttgccggtgagccttccgtgaatctgctccagccattcattcaactgcgcaataaacagtcttcttgtctcaatgactttcctgccataattcaccatctgcatatcccatatatcaagtgtatcctttaatgcagaatcaaaacctatctgcttgagaagattatttctctggttcacaattttgttgtaattggaaatattatgtagataaactttatccagctgacataattcgagatcgagaaaacgtcgtctctcccccggtccatttttaatcatggccaggtcttccggtgaaaaacagatcatatgcacaagaccaaacaattccccggattttctgatgggaataccatcaatagcaatcccttttgatttattcttcttcagatgcacgtcgattttgtgtcgtacatgctcctttgaaagcagcatccgaatatgggcttcttcttcaccaaaccgaatgatttcacgatcacggctgcctctatgggattttgttgtcgcacacatataaagtgcttccagcacattcgtcttcccctgagcattatctccgaaaaagatattaatgcccggacttaaattaactgaaagatgcgcataatttctgtaattctccaatgccagcgattctacatacatactctatacaacttctatcttttcattttcaaattcaacaatatcacccgacacgatttttttgccgcgcatataacaaactttaccgttgactttcacaagtccttcctgaacaacaatcttggcatctacgccggatcctaccagaccagttgctttcaaaagctgtccaagtttaatatgttcatcctttaatccaaatgtctgcatcattctactccttatttattcctgtatattttgagtcaagcaactgacaaaatgcaacacattttatgtcagctttatgaaatgatgcttgactctgaacaattacatgttgaaactgattggcaaaacaaggtagatataagactgttcatcgtttttgatgataaaaggtgcctttggattgaccagatacatggtaatctcctcatcatcaataacacgcagtgcatccaggataaacttcggattaaatccgatcatgatatcccgtccttctttgctgatatcaatatcttcattcatggaacccatggctgactggatcttcatctccatggaaccatctgtcacgttgataataattggctttctttcactttcacgaatcagaagagacgcacgttcaatacacccctgcagctctttcttgttaatggttattttggtattgtaatcacttgaaatcatcttgtcaatctggaaatattctccttccagcagacgtgatacaaccactgtctgatcaaattcaaacaatacatgtctgtctgtaaaataaatacggacatcatcatccatatcaccggacaaaatcttactgatctcattcagggtttttccaggaataactgctttgatcggatcatatgattctttaagtgaaattttacggatagaaattctctgaccgtccagtgaaacaagacgcagctgatcctgatcaatctgtaaaagttcaccggacatcattcggttgctttcattatcagaaattgaaaaaatcgtctgacgaataatttcttttaatgagaactgggaaagcgtaataaaatgggtcttttctatttcaggcaatgcgacaaaatcttcaccatcttttccggcgatattaaattttgctttttcacatttgatcaatgccttattgttgtcatctgtttcaatggtaacttcactatccgggagttttctcacaatctcagaaaacagtttagcctccaaagcaatacatcctttatcaaggacatcgccgtcaactgttgtttcaataccgagatccatatcattggctgtcaatttaatgacccctgatgttgtatcaatcagtatacattcaagaataggcattgttgttcttgcaggtactgcttttaagacagtgttgacaccggtaagcaatgctgatttattacaaatgattttcatatgttgatacgtcctttcgtatgttctatataaaggtgatgttatccacaaaagttaacagtcataaaaaagagaggtgtgcatatacataaatatatatatgataatgttgtagtagttgtagggggcgtttatattgtggataagctctacaaccgtgataaatgctgacttctggtggtgaaatgactgtgaataactgttgaaaaaaaataggataacatggcatttttccacaatttttaaaatcgcgtcccgcttcgcgggaaaggtaaaaaatgagtatccaccgcttgtccactgcactatccacaggttattcacaacgcaaataaaccatcaacaaattgtggataactcctgtggaaattcggtggaaaactcgttttatccagagtttatgctactttggagggtttaacttcttggtgataatatcaattgtactgcgtaactgctcatccttctccaagtcagtcttaatcttcttgatgccatgaagaaccgttgtatgatctttattgcccaacgcagcaccgatcgctgctaatgaaagcccagtgtatttctcacagagatacatacagatctgtcgtggataagagatatcgcggcttcggtttttaccaagaatatcatcttttgttaccttataattatagtgctctgttactgtctctatgatgacttccggagtgatcggtcttgcttcatccggtgcaataatatcctttaatgcttcacgggccagatcagtatcaattctgtctgcgtgtttcagacgtgaaaagttgtaaatctggcgcagtgcgccttcaagttctcggatattggagctgatatgatcagcaacataatgaagcgcatctacttctatattaatatgttcaagttcagctctttttaccaggatagcaacacgggtttcataatccggtggctgtacatcaacggttaatccgactttgaatcgggagatcagacgatcttcgacaccgacaatatcttttggcggtttatcggatgaaataacgatctgttttttattttcatacagtgtgttaaatgtatggaaaaattcttccattgtactgtctttgccggcaatgaactgaatatcatcgatcaggagcatatcaatattccggtacttatctttaaatgcctcctgggttttgttcttgatggctgaaattaattcattggagaatgtttctgtcgttgtgtatataattttgtaatctggattgtaggaaagaatgtaatgtgcgatggaatgcattaaatgcgtctttccaagtccaacacctccgtagatgaacagcggattgccgtaatctccgggatctgatgcgacagccagagctgttgcgtgggcaagttcgttgtttttgccaacgacaaaagtatcaaatgtgtaattaggattcagcgttttgtttgtaatgatcgatgcagcaggttttttctccggctctacagtctgggtggcctcaattttgccgagttcttcgctagtcgtaatgtgaatatcataaacgtcattaaaatactctgaaatagtgactttcagaggctgttcgaactttttctttatatagctgcacatttgctcaagttcattgttgacgagaatggtaattgtatgaccttcgacagaatagacagttaaaggctttatccatgtgttaaaagcaacgggagaaatgtcatgctcaattctcataatatccaatatctgatcccagttttctcgaattttgttaatcacgataatccccctaattatagtttacttattaaatattttataacattttaaatttttttacaatgcttttggtgaaatcttgtgtggaaattgtggataacttttatccaccagtgtgtataatatggaaaatcgccccagtgggtttacataaaattggacgaaaatcgtggaaaaatagtggctgtgaataagttattcaaattatacacaccccttaaagtagcataaatactgaaaatctggtatttatccaatattaatccacaagttatccacaagttatccactttttgtggataaggttatgaaaaacaaaatttttccacaaccagtagtgagtaaattgtggataaatccacatagcacctatatgtcgataaatcgtggaaaatgctgcaaaaaatcgtgaaaaaaaataattgttttacttgacggaatgagggcaaactaatataatagaatagattagataatacaataacgttagtctgtaattttatagacagcgcaggaagaataaaggaggtgtatacctatgaagatgacattccagccaaagacaagacagagatctaaagtacacggcttcagaaagagaatgagcactgctaacggcagaaaagttttagcagccagaagagctaaaggaagaaaagttttatcagcataatcgtaccgtttcatatggtatcatagatgtcagcttaggccgcagatttgtggcctttttctttcttattcgggatgattcgatgataaccatgatataattttgagaaagaaatggaagaatagaatggaatattcagaatcattaaagaaaaacagggattttaaaactgtatatggtaatggaaagtcacgtgcgaataaatatttggtcatgtacgtgatgaagaatggaacagagaagaacagaattggtatatctgtcagtaaaaaggttggcaatagcgttgtcagacatcatctgacacgtttgatcagagaaatttatcgtttaaatgaacatcattttaaaaagggactggatatcatatttattgtcagagtcaatgcaaagaagactgattatcacacactggagaaggcattgatgcatgtggcagatatccacagagttttggaaaagagccgtaatgagcaaaatgagtagaattttaatagcgatgatcagattttacagaaaatatatctcgccgatgaaaaggggatgctgtatttatattccgacctgttcgcagtatgcaattgaagctattatgaagtatggtgctgttaaagggagttatctggcagccagaagaattttaagatgtcatccgtttgcgaagggtggttatgatcctgttccataaaccaaggagggcaatacgttgagtattttagttttgacacagaccgggggcattttgaagccttttgctattatcctcggtttcattatgaactacatttatcgatttcttcagattttcggtattaataatgtagctctgacaattattttgtttacgttggttatcaatgtgctgatgattccattgacggtcaagcagcagaagttttcgaagatgtcttctttgatgaaccccgaacttcagaaggttcagaagaagtatcagaaccgtaaagatgaaaagtctatgcgtatgatgcaggctgagacacaggcaatttatgacaagtacggtgcaagtccgacaggcggatgtctgccgatgctgatccagctgccaatcctgtttgcattgtatcgtgttatttataatgtaccggcttatgttgaaccggtacgtgagatttatgaacatattgcccagccaatcatgagtgcatcaggtgccggcgatattatgacaacactgatcaaggaaatgagtctgagagtttccaattttgatattagcaatatcaataagattattgatgcactttatgttgttaagagtacaggatggagtgctgtcagtgatgcattttcaggcagtgcagatgttgtgagtgcgatttctcagtattctaccgagatcattcatataaacagcattccgggtggtctgaatattgcagatgcgcctgtggcacttggacatggtatcagtggtatattccctggtattatcattcctgcactggcaggtctttcacagtgggcgaacctgaaggtttcccagagaaatcagccgaagccggatttggattcgacaatgggcagtacaatgaataccatgaacctgatgatgccgttcatgtcagtattcttctgtattacacttccttccggtatgggtatttactggattgcaagtgctgtattcagaacaatcatttacctgtttattgataagttctttaataacaagagtgtagatgatattatcgaggctaataaagagaaagctgcaaagaaagccgagaaacgcggtgaacagaacgcaaaacttgaagaatatgcagctatgaagacaaagaatattgatcgtcgttctatttctcagattgctaatgcaggcaaaggcaatggagatgcaaaggcagagaagaagagtgaatcttctaatgccggcggaaagagcagcaagaaggttgataagaacaatgcagaggcggataagaagtccatatccggatatgcgcatatgctgaatcggcatgacgattaatttgggggattacatgcatggaatatattgaagtaagtgcgaagacagttgaagatgctatttctgaagctgctattaagcttgaagtgccaagcgataagattgaatatgaagtaattactgaaggaagcacaggtttcttaggactgatcggcagcaagccggcagtgattaaagcacgtaagaagttcaatcttcttgaccatacaaaggatttccttgcaagactgtttaaagccatgaatgtggatgtcaatagtacagtggattatgatgaagagagcagaacaatgaatattgtctttgatggtgaagacatgggtctgctgatcggtaagagaggacagacactggattctcttcagtacatcatcagtctggttgtgaacaaggaaagtgattcttatatccgcattaaagtggacacagagaattatcgtgagagaagaaaggcaacacttgagaatcttgcgaagaatcttgcctataaggtgaagagaacaagacgaccggtatcccttgagccaatgaatccttatgagcgccgtgtgattcattctgtacttcagaatgaccgttatgtagaaacacacagtgaaggtgaggaaccataccgtaaggttgtgattactttaaagaaagattaccgggagagaagtcctagaagtggttacaaccgtgagggacgctataatcgtgaaaataattataaccgcgagagaggctatagaagagaacgttcttacagccgtgaagaagttgaaagacctgcggagaataatgagcataacgatagtaatgataatgtctgatgcaggcagcacgccggaggcgttcttgaatgtataaatctggcatatgatcagggagctgtcgcatcagtaaggcgtgtattctatttgatggaatacgaagcccgggatgcggcagcttttttgtgtcggcaggaatttgggtggaattttctgtgacaccgaaagggcacttggtgccgggatgtgcaggaggtagaaaatgcagagtgacacaattgcagcgatatccacaggcatgacgaatgcaggtatcggaaaagtaaggctcagcggcgatgatgcggtgacgattgttgaccggatctacagaagccctggcggcagaaagagactgagtgatgtctcaacacatacgattcactatggctatatttatgatggagactgcctcattgatgaggtcatggtattgattatgagggggccgaacagctatacaagagaggacgttgtcgagatagattgtcacggcggtgtggttgttatgaaaaagctccttgagacggtattgaaatacggcgccagactggcagaaccgggagaatttacaaagcgtgcctttttgaatggacggattgatctgtctcaggcggaggccgtgattgatgttattaatgcgaaaagtgatatggcactggagagttctctgaaccagttaagaggaagtgtcaagaaaaggatagagaagttaagaaaaggaattataggcaatattgcgtttattgaagcggctctggatgatcctgaacacattcaggcagaaggttttggcgatgagttggctgttcaggtgcgcgggtatatggcagaacttcagaaaatgctggattccgcagataatggccgtctggtcaaggagggaatcaagactgttatcctgggaaagccgaatgcaggaaagtcttcattgatgaatgtacttctgggtgagaatagagccattgtcacggaaattgccggcacaaccagggatacgctggaggaacatgtcagtatacatggtattccgctgaatattatcgatacggccggcattcgtcagacagaggatgttgtggagaaaatcggtgtcaggaaggcaatcgattttgcggaggaagcggatctgatcatctatgttgtagatagttcaacggagatggatcagaatgacgatgacattattcggatgatccagagcaaaaaggtcattgtgctgatgaataaatcagatctccggccggttgtgtcacgctcagatattgagaagcagctgcaggcaccgataattgaaatatcagccagagaagaaacaggactggatatttttgaggatacattgaaagacatgtttttcgcaggtgatattcactacaacgatgagctttgcattaccaacgtgagacataaagctgcgattgcagaagcgcttgaaagcctcaaaatggtgatgcacagcatagaagatgggatgccggaggatttcttctcaatagatctgatggatgcttatgagcagctgggacatattatcggcgaagcagtggaagatgatctggtggatacaattttcagtgatttctgcatgggaaaataaaggagtacaaaacggtggaatataaatacgaagcatacgatgtggcggtcataggcgctggacatgcaggctgtgaagcggccctcgcctgtgcgcgtctcggacttaagacgattatttttacaattagtgttgaaagcattgcaatgatgccttgcaatccgaatattggcggcagctcaaagggacatcttgtcagggaaatcgatgcccttggcggtgagatgggaaagaatatagataagacattcattcagtcaaaaatgttaaatagttcaaagggacctgcggttcattctctccgtgcacaggctgataaagcggattacagccgaaaaatgcgccagacccttgagaatacagataatcttacaatcaaacaggctgagattgtggacattatcgtggaagaaggatgtatgacaggtgtgaagacgcatacaggcggaatttatccatgtaaagcggctgtgcttgccacaggtacttatttgaaggccagatgtttgtgcggtgaaacaattacttatacaggtccaaacggattaaaggcggctaatgatctgtctgaagcccttaagagagaggggattgagctggtacgttttaagaccggaactccggccagaatggacaagagaaccattgatttcagtaagatggcggagcagtttggggatgagacggttgtgccgttttcatttacaacggatccggcatcggtacagaaggagcaggtttcttgctggctgacttataccaatgaggaaacacatcagatcatcagaaacaatttggatcgttcaccgatttatgcgggtattattgagggaacagggccaagatattgtccgtctattgaggataaggttgtcaagtttgccgataaaaacagacatcaggtttttctggagcctgagggtctttatacaaatgaaatgtatgtgggaggtatgtccagttctcttccggaggatgttcagtatcagatgtatcatacggtgccgggacttgaacatgcgaagattgtccgtaatgcttatgcgatagaatatgattgtattccggctacgcagttgaaaccaacgttggaattcaagaaaatcagtggtctgttcagcggcggtcagtttaatggcagttcgggatacgaggaagcggcggcacagggattgatggccggtattaatgcggcgatgaaggtgcttggaagggatcaggtgatcctgaagcgttcggatgcttatattggtgttctgattgatgatctggttacgaaagaaacccatgaaccgtatcgaatgatgacatccagggcagaatacagactgcttctcagacaggataatgctgatcagagattaacagcaattggtcatgatatcggtttgattgatgatataagatatcaacacctgcttcagaaggaagtgttgatttatcgggagattgaacgtgtcagccatgtcaatattggtgcgggtccgaagacacagaaattgttggaagcatgcggcagtacaccattgaaaacagctgctacattggctgagttgatccgcagacctgagctgaattataagatgttggcagatattgatgaggatagacctgaattgccggatgaggtgactgatcaggtagagatcagcattaaatatgatggctatataaaacgtcagttgagtcaggtagagaagtttaagaaacttgaaagtaagacactttcggaagatatctgttattcagatatccatggccttagaattgaggcacagcagaagctggataagattaaaccggtttcaattggccaggcgtcacgtatatccggtgttacacctgcagatatttctgttttgctgattcatttgtctcaggggggtcagaagcagcatatgcaggacatgcacaacgatgaaaagccggaaaatgatacacatgaaaccgccaatagagaataaatgaggaaaaatatgtattcgattgaaagctttaagaaaaaagttaatatgttacatattgaattaagtgacaaacaatataatcaatatgtaacatattatgaaatggttgtagaaaaaaataaggtcatgaacctgactggaattactgaatttgacgaatttattgataagcattatattgacagtctatcgattgtcaatgcggtggatatacaccaggttcagagtgccattgacgtgggaaccggtgccggatttccggggattcctctgaagattgcctttccgcatctgaaaatcacattattggattcgttgaacaagagaattaattttctgaatgaagttgtagaaacgttgggcttggaaaatgttgagacatgccatgggcgtgctgaagatttcggccatagaaaagagtatcgtgagcagtatgatctttgcacatcgcgtgcagtggctaatctatcaacattaagcgagtattgtgtaccatttgtaaaaatcggtggacaatttgtctcatacaaatctgggaatgtggataatgaattaagagaatcagaaaaggcaatcagtattcttggaggagaaatcggaaaggtctgtagttttgtacttcctgagacagattttgcgaggacattggttccgattaaaaaaatcaaatcaacagggaaaaaatatccgagaaaagctggcacaccatcgaaagagccattacaatagggaggcagaacatgattagaggcgtttatctcaatacaatgaatgatgatctcagtaaatgtatgaagatttatcaggatgtttttgaagaagatatgaatgagaatgttgaaacttggaaaaattctaatagtgaagacatggcgatttatcttcttttgtataatgaaaacgagataccggtgggaacggccagactgatctttgattttgatggtgttttcaaatttgatggattggctgtgcttcctgagttcagaaagaatggttacggcgatttcattatgcatatgatttttgacaaagcttatcagagcggtgcacattatctggtaagcaatgatatttatcatatgcctgattattttaagaaatatggtttttcaattgaaaataatcatttatccctggatttaaaacagtattttaatacacataaatgttgtcattaacaatcgtaaaaagatcccgagtcgcatttgattcaggatcttttttatttacgcgagcaacgagccaaagtccgtgcttgcacgagactttggcgttgctaagcgccagtggcgcttgtttagcaacgaccgaaacggagtgtagaggccgcgataacttgagaaactcgcggagcgtgtttctcatagttgcaagtgttttattcattttctttcgtggttgactgagaagcagatttcttcttagcaacagcttcttttttcgaaggcgtctcttcagactgtgcctttgatttggtgatttttcgaattttcttgcctccggcaatggtggttgttgtcggttgtggtgagttagatgcaattgcatttttgacagcttctgcttcctcttcgcttaatggcagttcacattcaccgcgtacgatgtccttgatatatgtataagaaccttcacggctatggatacagttcataacaaaaccagtattgctgtcattgagaagtgcataggcaaaacttaattgaccgcctaattccttaaatgcatcatatttaacaacgccgcatttctgataggaacggtttaaactcttttctacatacatcatgcgtttatgaagtaagtcagtctgctcttttacaagatcaatatcatcaaattgtgctttgaaggtatcctcaagggtttttccatttttacctttcataaagattttataattcatttcaagtcgtgactgtcttaagacaagcataatgacaagtacaattgccacaacagtcaggataagtgaaagtataactaatatgcccagatcaaaatttaatttggcaaagattttactttccatttttacctccttgttagtttaagtattatttaattgtttctaataaagaaacaattctttcaagatcctcttcagagtaatattctatttcaatgcggccttttttattgctttttgcattaatctgaacttttgtaccaatgattgacttgattttatcctctaactgatgatagataatggctgtctgtgggtcaataccggctgccttcttatttttcttgtcagcaagcatgtttttgattaagcgttctgtttctcgtacgcttaatttgttgtcaaatattttcatggccagtgtatattgcagttcaaggtctgtaatagccagtaatgcacggccatgtccgcttgaaatcatttcgtcaacgatcatttgtttaactctgttgtccagttttaacagacgcagagaatttgttacagcagttcgactcttggatactttttcggctgcttcttcctgctttaagccgtattcatcaattaatttctggaaggcaatggcttcctcaattggattcaggtcttcacgctgaagattctcaatcaatgcaatctccatactctccattggcgtgtaatccttaataataacggggatttctgtgagtccggccaatctggctgcacgccagcgtctttcgccggcgataatcgtgtagaaatcatctttcttctgtacaatcagcggctggatgatgccgtggagtttgatagaatcggctaattcctgaagtgcatcctcatcaaaattttgtcggggctgacttctgtttggctctatttcatcaattttaacaagtgtttctgcatttttctcaatgactttttcaacaattttctcaacaggtacctctacaactttctcgacaggtacttcaacgattttctcaacgaccttttcaacaggcacttcaacgattttctcaacaatattggaagaatgggtcgcatctttctgagttgactttaaatccgcttcagtctttgaagatgtggattgcaattcggatttcttaggtgcagttgtctcggaatgtgttgtcagtgatgttgttggggagataagagcatccagcccgcgcccgagcccttttttcttctttacagccattcgttttcatcctctttctcaattacttcttctgcaaggtatctatatgcttcagcaccggcagatcgggaatcgtacatattgattggcattccgtaacttggtgcttctgcaagtcgtacatttctaggaataatggttttataaatattcttgtccagattttccttgacattctcaacaacctgtagagaaaggtttgttctggcatcatacatcgtgaaaacaacgccttctatttcaagcttcggattcaatcgttccttaattaaatcaatggtatgtattaactgagataaaccttcaagggcatagtattcacattggatcggaacaataacagaatccgctgcagccatagcattgattgtaagaagattcaaagatggcgggcagtcaatgataatatagtcatagtcacttctaatcatatccagtttggatttcaaaaggtattctttgttttcaaatcctatcaattcaatctcggcaccggacaaattgatgttggatggaataacagacagattctccataacgcttggatagatgcattcagaaagttcagactcatccagaatcagttcgtagacggtgttttctgtctggtttttgtctacgcctaacccacttgttgtattcccctgaggatccatgtctaaagttaatacttttttgttcttttctgccagacatgcagacaaattgatagctgttgttgtttttcctacgccacctttttggtttgcgacagcaataattctgctcataaatcctccttatattactctgttttattatccggattaaaattcccggattaatcattgctctaataacgctcattaaattataacatttcttataaaaataatctacctatattataaatgtttcacgtgaaacatttgtgaaaaacatataaaaatagtatatttcatgtttcacgtgaaacatttggaatacaagcaggagatatgaggatgtttcacatgaaaaatcctacgcaaattcggaaggctaaggcgactactattatacaaatagaaaagccaatgtttcacgtgaaacattggctttgtttgtaccagaatcaagattctttaaaacaacggtttaaaatcacacagttgcggattacatttgttcaggacactgaataccaagtaatgataaagcgtctttgatgatgtaacgtgcaatctttacaacattggttcttgtatatttggttgtctcgtcctcaacgttgatctgacactcatgatagaatttattaaatgcatgggctaaatcaatgctgtatcgagcaataactgaaggctcataacgttcagctgcatctttgattacctgaggatatctttcaatttcctttaagagaccgatagatgcttcgtcggttaataatgtatagtcaattgtatcaggtacttcgccgatctttctcagtacacttgaagcacgtgcataagtatactgaacataaggacctgtctcaccatcaaaattcagcagcttgttccagtcgaatatgacatccttgattcgctggttgtataaatcattgaagataatagcaccgataccaacctgtttggcaacttcttccttatcaggaatatcagggttcttctcttcaataatgcttgttgtcttattaatcgattcacgaagcagatcttctgcaaaaataacattgcctttacgtgaagaaatcttaccgctcttaaggcttacgagaccataaggaatatgaacaagattcttggcgtaatcattgcccattaattcaataaccttgaatacctgtgcaaaatgcagtttctgttcaagacctgtgacatagagacaacggtcaaagttgtaagttgccttacgataaagaatagcagcaagatctcgtgttgcgtagatggaacttccgtccttcttggcaacaatacaaggcggcatatcatattcgtccagaggaacaatcatagcaccctggctttcctttaataagccatcatctgttaggcgcttgataacatcggctgtcttgtcgcgataaaaactttcaccggcaaaggaatcaaattccatacctaaaatgttgtaaacacgcataaattcctttaagctgatatcacggaaccactgccagatctcaagggcttcttcgttaccctgttccatcttcagaaaccaggcacgtgcttcatcattcagcgaatcatccttttcagcctcttcgtggaatttgacatagatatccattaattcttcaatacctttttcttcaacggcttcacgactgccccatttcttgtaggcaacaattaatttgccgaactgagtgccccagtcgccgagatgattgatacgaacgactttataaccgagcttggagaaaatcttatacagagaattaccgatgatggttgttctcagatggccaacatggaaattcttagcaacgttaggtgaagagtagtcgatacagattgtcttgtccttaccctgatcagaacagccataatcagttgcgttgttatacttatcgataatctgctgtgcatactgtgctttatcgacataaaagttgaggtaaccgcctacaaccttgatttcacttaaaaatgcctgatcaccaatggactctttcaggtcctgtgcgatcataggaggcgccttgtgataggatttggcaagacggaaacatggaaatgcaaaatcacccatttccggttttggtggaatttcaataagctgtgagatttcttcgctggtcagaacttcgatgttctgagacagtaaattgacaatttgattcttcattaaaaacacctttctatactaaaagatagcttaaacttataaaatgttagctagcggtaacaaataacaaaaaagaacataattgaacagaaaataagctgaaaagcggtagatctgctgattgtataagatgttctctattgtttttaacatatgttctattattttacaatagatttgaaaaaatatccacactttttcaagaggatataaaggcaaattacgggaagcaagctatgatagagacttgtaaatattgcaaacatgacatataataatagtacttgacagaaaggagcggatagtgtgaaagaaagcagaaaaaagcttcttaaagggatcgtaactgcagctgctgcggcaggtgctgtttatggtatgaaccgccttgtttttttcctgtcaacgatgaaggatttgttgacatcaaaagaaaagtcttattataactggcggtttggtgatatatattatgcaagaaaaggtgaaggacgccctgttttactgttgcatcagctgagtgcttcggggtcagattgtgaatggcagtcgatgattgatgaactggcggaggatcatacggtttatacgattgatcttccgggatgcggccgatcacagaaagagaagatggtctataccaattatctgtatgtgcaggcagtgaatgattttgttaagcatgtgatcaagacaaagacggatattattacaagcggggatacgtcgtcgattgcagtgatggcctgtcacagtgagccttcattatatggtcgttttatttttattaatcctgaatccttggatcatatgatcaggacaccgggaccacagcagaagtgcctgagttatctgctgcagctgccgttagttggtacgctgtattatgttctggcgaattccagatggaaggttaagagagattttaggacgaaatattattataatggagacaggattgaaccaggcatggaagatatgttttatgaagcggcccatctgggcggatttgcagcgcgctttgcatatgccagccaggttggatactatacgagaatcaatgttgtgtatgcattgaagcaaattgatcacagcatgtatattatcggcggagaagccatggagggtatggatgatacgattgcagggtatacgcattttaatcctgcaatagaggctgttcggatggagggcacaaagggaatgccgcatatggagaagccggttgaaactgcagatttatgtaaactgtatttggaacgctgatgcgaagcggacagtgagaatagaggagaggaaaagggttgtcggctcatgacatgacgcggcagccctttttatctatattgaaacaatagtcctgcttttgcggagggtgaggcagagagtgaaaaaactggctggagattgaataaaatgtgcaaaaataatgaaatagaaagaaatgatgaacagcccttgcttgagagacttgaggcgtatgggcgcacagatgtctatccgtttcatatgccggggcataagcggcgcctgggtccaaaagagatgggacatttatatgagatggatattacggaaattgatggatttgacaatctgcatgaaccggaaggcatcttaaaagatgcacagctatttgcggcggagctgtatcattcggaagagacagcgtttattgtcaatggcagcacagcggggcttcttgcagcgattgccggaatatgccgggatggcggagaaatccttgcagcaaggaactgtcataaggcggtatatcacgccattgagctgcatcatttgaaaccttattatatttatcctccaataaatacaaaatacgggataaacgaagggatttatccacaagatgttgaaaaaatgtggataactcaccaaaatatccaggcaattgtgattacatctccaacatatgatggtgtggtatcagatattgaggcaatctgtgagattgcacacaggcatcgtgtaccggtgattgtggatgaggcgcatggtgcacatttttgtttttctgattattttcccaaaagtgcagtggcatgcggcgcggatgtggttatccagagtacgcataagacgctgcctgcaatgacacagacggctttaatccatttgaatggggatttgatcgatagagaaagaatcagaagaatgctgaccatttaccagaccagcagtccttcatatattttgatggggagtattgatggctgtctgcacatgttgtcagaaaatggtgaaatgttatataaggcatacacagaacgactgcagaaactgagaaatgccattcatgagcaatgccgttggattaagcttcctgagtacgaagagctggacgctgcatgttcaaaggattatgacaagtcaaaaatagttttgtcggtgagaaatacaggcatgacaggcagacaatttcatgagatactgttacatgattaccatcttcagatggaaatggtttcagcagaatatgtgcttgccatgacggcggtgggagactcagaagaaggctatgatcggcttcttcatgcgctggtggagacagatgcgaagatcaatgcgatgcttgaacaaaacgaagccaaaaaggatgctttggatgaagaggagaagctgcatgactgggcgaaacttccggttgtcagtcagaaaatgaccatttacgatgcagaacaaagaaaaaagattttgtgcaggctggatgatgctgcaggcgaaattgcagcggactatatttatctgtatccgccgggaattccgattgtaacgccgggggagatgattacaggggcggtcattggtacgattcattggtggctgtcagatggactgcatgtcagcggcgtgtatgaggaacgggatgttcggattatttgctgagaatcgtttgccgggaattgggtggaacgctgcctgatgacagaaaatagataataagaaaaatggcaatagaaataataaggaaaatgccaatagaaagagaaatgatatgggaaagttattttgcctgatagggaaaagtgcatcgggaaaagatgctatcttcagatatttgagggataataaggagctgggtctgaaagaaattgtgccgtacaccaccagaccaatgagaaaaggggaagaaaacggcgttgggtactattttgttgatcaggccgcttatgaaaaaatgtgtcagaacggaaaagtcattgaaagcaggacctatgagacaataaacggaccgtggcattattttacggtggatgacggacagattcgtctggacagggataatgcgattttgatcggtacgctggaagtgtataatcagatgaaacggtatttcggggaagaacaggttgtgcccctttatattgaagtggaagacggtctgcgtttagaacgtgctcttgccagagaaaggatgcaggatgtgccgaattatgctgagttatgtcggcgttatctggcagatcgacaggatttttcggaggaaaaaattgctgaagcgggcattttaaaacgctacgaaaatattgattttgatgcatgctgccgggagattgtccgtgctgtgaagatattttgaaagaataaatgaataaaaattcacagtgtaaaaaagcatcaattgtacaaaaaatagtgaatatatgttatactgttgatagaggtgatatgtatgacaggtttcggcgatattatcggacatgaacagattattgaacatttcaggagtgcacttaagaatcatcaggtctctcacgcttatatattaaacggtgagaacggttcaggaaagaatatgctggcgaaagcttttgcgaaggcgctggtgtgtgaggcaggatatggtgattcatgtaatatgtgtcgggcgtgccatcagtttgacagcggcaatcacccggacgtgaaatggattacccatgagaaagcgaacagcatcggtgtagatgaagttcgtgaacagattaataatgacattgtgattaagccatacagcagcaaatataaagtttatattatagatgaagctgagaagatgacagttcaggctcagaatgcccttctgaagaccattgaggaaccgccggaatatgcagtgattctttttctgacgaatacgttggatgtactgcttcagactgttcgttcaagatgtattattatgaatctgagaagcgtggatacgaagctgatccagcagtatctgatgcagaagtatcagctgccggattatcaggccagagtatgtgcagcctatgcgcagggcaatgtcggtaaggcaatcatgatggcgacttccgaacatttcagggaaatgcaggatttccttctgagactcctgaaacgagtagatgatatggaagtatatgaaattgttgcagctattcatgatatgaccacttataaaatggatatcagagatctgattgatctgatgatggtctggtatcgggatgtcctgatcctcaaagcgacagaagatatcaaccaactggtgtatcaggacgagcacaagtaccttcagaagaaagctacgacgtcttcttatgaaggactgaataacattatggaggcattggagaaggcaaaagtacgtctgaatgccaatgttaattttgatattacgatggagatgctgctattaacaataaaggagaattaaaatggtaaaggtaattggcgtgagattccgaaacgcaggtaagatctattattttgacccgctggatctggatatagaagtggggcagaatgtgattgtggagactgcgagaggtattgaatatggccatgtgctcattgcaccgcgtgaagtagacgacagcaaagtgatacagcctttgaaggctgtcattcgtcttgcaacaccggaagacgatgagattgaacgcaagaataaagagaaagagaaagacgcatttaagatctgccttgagaagattgccaagcacaaactgcagatgaagctgattgatgcggaatatacatttgacaacaataaagtccttttttactttacagcagacggacgaattgatttccgtgagctggtgaaggatctggcttcggtattcaagacacgtatcgaactgcgtcagattggtgtccgtgatgagacgaagatcatgggcggtatcggtatctgtggcagaagcctctgctgtcatacatttttgtcggaatttgcacctgtgtcgattaagatggcgaaggaacagaatttatctttgaatccgacaaagatcagcggtgtctgcggccgactgatgtgctgtctgaagaatgaagaggagacgtatgagtggctcaacagcaagctgccgaatatcggtgatcgtgtgacgacagatgatggctttaaaggtgaagtacagagtgtcagcgtactgagacagcttgtgaaggtgatcgtcacccttgagaatgacgagaaagagatccgtgagtataaggtaagccagctgaagttccgtccgaaacgccgcagagataaaggcaatgtgaatgatgcggagctgaaagcccttgaggcgatggaccgtaaggaaggaaagtcatcattataatggattatttattacccggtgaaagatttgatgaacttcaaagaaatggctaccgtattattcagaatccggcaaagttttgctttggcatggatgctgttctgctttcaggttttgcacgggcaaaacgtggtgaaagggtactggatctcggaacgggtacaggcattatcccgattctgatggcagcgaagacggatggtgagcattttacgggacttgagatacaggaagaaagtgtggatatggcggccagaagtgtagcctgcaatgggcttcagcagaagatagatattgtcaatggcgatatcaaagaggcatccgggatattcggggctgcttcttttgatgttgtgacgacgaatccgccgtatatgacggatacccatgggctgaagaatcctgatatgccaaaggcaattgccaggcatgaagtattgtgcacattggatgatgttgtccgggaaggggcaaaagtgttaaagcccggcggcaggttttatatggtgcatcggccattcagactggttgagatttttcagacgatgacgaagtataagcttgagccgaagcgaatgaaactggtgtaccctatggcggacagagaaccgaatatggtgctgatcgagggcatccgaggggcaaaatccatgcttaagattgaaaagccgctaattgtttatgagaagcccggcgtttatacttcggagatctatgatatctatggctattagaataagtgcatagcgatgcagcagataaaatgcagaaaaaaggcggatgaattttctcatccgccttttttctgcattttatctgctgcatgtaatatggatcattcattcggtatcctatatccgataaaaatcggttattaacggtattctttgaagcaggtgaccggaatcatatagcggttaggcagatccggccgcttacccggatattcgccgatggcaatgccgttgtagcccttttcaagcaaggtattcaactgcgccagactgatgatggccacggaattctcgccatctaagtaagcaatatggtagaattcagggcgaataccggcattttttgtaaatgcgcagatattcttgtaaacatgcttgcccagcagcaggctgtcgcagccatatttcggaaccattatgccgttcccctgagttgttccctgatagcggatctgcttcttgatcttgaggtagagaagcgaattgccattaatccagtagccgcttggcttaccgatcagccactggttctccgggcgatgctggtagtaagtcggcagatatgcatagtcattgaagggaaatacagtctctttggtgccgcgggatttgctgatgagctcgctgataatggcacaggattccttattctcagcaatctgattctcaattttggatggggcataaggattggaaatcttcaatttgccgtgcttccttgggccgtgttcctgaagaacaatattatccgcatatcttcgggaattctcaaggacgatgagatcgaaagtgacatgggcattcagtggatactccctgccctctttcatcttgaaactgatgtcatgttcgccttcggctttgatgtagccgtatttctgttcgggattgacgtatttgattgtaccttccatgtcgatttctcctttgatggtgatgttttgaagaaaaatgctcgtactgagttgttggttctattatagcatagatgggagaatttctgtagtccggatggtattttggaagttggatttgaggggggattatagtataatagggatgattaagcaaagcctaaagccccggatgctgaaggggtgaaaatatgatgcagagaaaatgataaagaaaaatgatgcatagaagcagaaaagaaaggaatcggcagaaatggcaggaaaattatatttatgcgcaacgcctatcggcaatctggatgacattacgtatcgtgtgcttgagacactgaaatcggtggatctgattgctgcggaggatacacgcaacagcattaaattgctgaatcattttgacatacatgtaccgatgacaagttatcatgagtttaacaaaattgataaggcaaaatatctggttaatcagatgttagacggtacgaacattgcattgattacggatgccggtacacccggaatttctgatccgggagaggaattggtgcgtttttgttacgaagcgggaatagaagtgacttcccttccggggccggcagcctgcattacggcattgacattgtccggtttatccacccgcagattctgttttgagggttttcttccaacagataagaaggagcgtcaggtggttcttgaacgtttgaagaaagagacgagaacaactgtcttctatgaggccccgcacaggctgctgaagacacttccgctgctgatagaggcagcaggagaggacaggaaggtttctgtatgccgagagattacaaaacgccacgaaacggtgttcagagctactcttggtgaagcgtatgcctattatcaggccaatgagccgaagggggagatcgtgcttgtgctggagggggtttctcagaagaaactggatgaggaacagcagcagtcatgggagagtatgtccattgaagatcatatggcgctgtatacaggcaacgggatggaccggaagcaagctatgaaaaaggtcgcagcggacagaggtgtgacgaagcgggatatttatcagtatttggtggattgtaaaggcgaataatacaaaataaatttaaaaattgcttatttaataagcggtggggaagaatgagtaaaataaaataatataggccatgtgcttgacagctctaatggaagaaaataaaatattaattgaagtagtgtaaattggtacgaaaagggtgtaggtatgacaaacttagaatttgaaaatttgttacagatgaaaaaagtgtttgttaaagacaatgtgagtttgccgagccgtggagaagcggggatttttgatttaaaaagtaaaacaacaaatgacaagttctatttggatgtagaccgacgtggaagaattgaattttccaagtttaaaatacagaatcgatttgcaggcaacaaattgccgcttgttagaatagatattgattctgcaccgcatatgaatccagatggttcgaaaacatccagaaatcatatacatatttttaaagaaatggagaatgatacaggaaatcttccatgggcatatagtttagaagatttcgaaccgattgattttaacagagactgtattaattttatggaaattttttctggcttttgtgaatattgcaatattattatgaataatattcagggggtgatataattatggctcagttggatatagattttagtaagcaatatttggaatggctgaaacagaacattgaacaatatcagataagggattctatattcagaataacattacctttcctggatagaaataatgattgtgtggaagtatatatagttgataatggtgatggaacatatcagataacagatgatggagcaactatcaatgacttagagtttagtggatttgatattgaaacaagtgaaagacgaaagaaaattttaaattcaatagttgccgcgtatgggataacgcggttagatacgaatgagttagttgtaaaatgtacaagggatgatttgcctttaaaaaagcatatgttggcacaatgcatggttaaggtaagtgacatgttctatttatcaaagaataccatacaatccgtatttcttgatgatgtacaaagcttttttgatgcaaatgatgtgcgttatgttgataatatatgtctcactggaaagagtaagctaacaacgcattatgattttgctattgcacgttcaaaaaagtcagctgagagattcattaaagttgtaaataatatggatttaaatgcagcaagaaatattatttttgcttggaatgatacaaaagatatgcgtcagccggaagcaaaattatatgcatttattcagaatacagacaaaaaaatatcggatgatgccataggagcgttgaaagaatatgaaataaagccagctttatggtcgaaaaaagatagttatatatcggagttaattgcctagttccaaagctccccacattttacaactggggagctttgatataaaaaaataaaacatatttgagcggtcattgttctgtcagacaccctcaatcacatgaagtcctgcaagacgggccatttccataatggactgcttggaaactttcttgtcatggaaatcgatcagttcatccatattgccggtaaagatatcactggcttcatattttctcaaaataatgcgatcgtcatctacaaagatttcaagcgggtcatgttcgccgatattcaggttgcgtcggagctcaatagggagcgtaattcttccgagatcatccagctttcttacaacacctgtgcttttcatcaaaaaaacctccttatttcaggcaggcaaagggaaatcgtgcctgcggaaaacaaaaaaagacaaccaaaacaagtgtttcgattgtctccattgacatacatatttatctgcgttctaatatatcatttaagaaagaagatgtcaactgaaattgttgaaattttccagtatgttggtgggaaatatattgtcataccggggtgcagatggtaaaataaacgggagaatatctgacacgggggttataaatgtcggataaacaaaaagataatggaggggtttacgatgagaattttaccagaagaaacaggcgctgttgtgattgatatgcaggagaagctgatgatggccatgaatgagacaaaggcctgcgaagagaaggctgcaatgcttctgaaaggccttcaggtgctgtcgattccgacggtgatcgttcagcagtatacaaagggactgggccacacattgccgtcactttatgaggcagcaggcacaacggaatactgtgagaaggcatctttcagctgttgcagaaataaggcggttcttgataagcttgagagtatggggaagaagaatattcttgtgatgggaacagaagcacatatctgtgttcttcagtcctgtatcgatctgaaggcagcaggatttcagccggtgatggtggtggatgcagttgcttcacggcgggaagcagacaagaagatagccattgagagagcaatccaggaaggtattcttgtgacaacagcggaagcagtcctgttcgaactgaccctggactcaacgaatccatgctttaaggccatttccaaacttgtgaaatagtatcttataagagtgtgaaataatagaatatgatgaagaaatccctcatttcaaaacaatatggttcagaagccattgggttttgaaatgagggattttgtctattatttggactttttgtcggcggatttcttatcagtagatttcttgatgaatttcttcagtttcttgcgggtgcctttgctgatgtcgtgttccatcagatctgcttcggcaagagctgtctgttcgtctacatcaaggatctccgtgagaaaacgatagacgatcttgttggtatcaaggatattcttggctgtgtcacggcctgcgtccgtcagggtaatcttgccgtaatgctcatgttccagcagttccagttccttcaaggtattcatggcccggttgacacttggcttggagatacccagggaacgggcaatatctgtgatgcgcacttcctgaccttcaaggttcaaaaggtatatttcctttaaataatcttccaaagacgcggataatcgtgttgtttcttctttcattttattaccacctttcaacttgtgaggtcggttctgtgtcttttgatgggtgcagtgctcagatatccttcagattcttctcaaaggaggagagtcccttgatcaggatccggcattcctcttcggtcagagaggcatggatggcatctacaatacgggtgtggaaatcctcatgatgccggaaggcggattcacccttctcggtgagagatacgagaacaacacgacggtctgtttcactgcgggttcgaagaacatattcctttcgaaccagtccgttgatggcaatggtcagcgtgcccacggtgacgcctaccttcttggcaagggaggacatattgacttcgttgtgaagaccgatggcattgatgacatgcatgtcattgacggagatatccttgaaggtgtccctgataagaaaattccgttcaatatccagtgcatgatcaaaaagataaacaaggatttcgttcagctgatcataattatccataaaaaataaacctttcacaattattctgtaccttctgacatgtgacctgtctgaagtccataacgtacatatatctaaggctcattataacatttgtaccatgtgacggcaagaaaaataaagggatgaaaagcaaacaggaggcgatgcagatgacatctcctcctgtcggaaaattctatgatatgatttaaattatttcagttcgtcaacaaccttctggatagcagccagtgcatcatcaggaagcttgtcatagccctctttttctgtggcgaaagctttgatctcgtcgacacggtcgttcatgcgggctttgagctgatctgtgtagttcttgtcctgcatatcaggcacaaaaccttcccaatccatgatctcgatatcggagaacggaccccactgatggaaatcagcacgtttctcaacgatagcttcgaggatacccagagtatcttctttctggactttcttgcccatgaaatcgccggtattaacgatgtagcagtcaacgtgcttctcttcaaccagtttcttgaacttctcatagtcattagccagaggatatgttctgaatgggttggcataaggaacaacaaccagtttgttcgggtcaacgccaggcgcaagtctttctgcagaagaacgttttgttgccagtgtggcacccataacggaagcaagggaagctcctttcagtttaacaaccggtggaattgtagggtctttcataatccagaagatcgcattaacaggggcgttaatcttgtccacacggttcggagaccagagcttggacttgatggcacggccattgccgttacggatatcttctgtgacaagctggatcttgccgtcctcatccattgtagcggagcagttctgagctgtcagaaggaatttgttgtcagcgcagcctgtcggatagtccgcagtcttgtcgaaatatgtcggttcaatggcaatggatgagcatgtatctgtattgataatgaaagcatcatcatggaggactttgatctcatacttgccaccgtgtttggcatgtgtcagagtggacttgccggagcctgacaggccgtaaacggaagcaacgtacttggagccgtcaggaagaaggtattccttctggccgccgtggcaggaagcatagccgttgcggttggcgatggcccataccattgtcagtgtgcccttcttgtgctcaccaaagtatctcataccaaggatgcatgcacagtttgtctctgtattgaaatagcagagtgtcttcttggcaggatcgcttaagcagtcaaggctgacaccaggtgcttcgttcggaatccactgtggatctgaaaaaatatagatatctgcttctttgccgtcgccgacaggtttggaagctttgtacatcttaacatagtcatcggacatatactggaagttcagcatccagttgtaaagaatgttctcttcaccttcaggaatcagcaggtggcacttcaccatgaattcagggtcaaggcctgcgtaaacggttgcatgatacaatttcttgaaccttgccgtgtaaacggcatccataacaactttgtccagtgcgtcacagtcaacgccgggttcgcctgcgatacgtcgggctgttgcgtaacggcctgtgatggcaccgtcattgaacagaagtactcttgcatcactgtcaagaccgaattcttcacctctgtaaacaggcatatctgttacgatcgtaccaggtgaattcttggccagattataagcttctttcaatgtgttgactttgacaacattattgccgtagaaggcagcttcgatgatagaacgtgtcttggaaaaaccaacttttccggcaccgatttcgttgagtggataataagcttttgttgacatatctatactcctcctgaaataataattcaagtcgaacgcttgtacatgcttgtacagcgtataccactaatcaatagtttagttgattaaagagtgaatgtcaagttgaacaggataatcaagttctaatataatctttttgtatatatttctctaaaacatcaaaggaacatggtccgatgtttaggatacattgatgaaattcttttaaattaaaatcatcacccatggtttcttcggtatcatctctgagttctttaaattccatataaccgatgcagtatggaaggtaggaggcaggatcggagacaatggcgcgaaaaacggaatgaacggtttcgtcatcgtcgaggccatagtcggacagaaattccgtcacatcgtcagtggtccagccctcatagtgaatgccaagatcaatccggccgtagagtgccagcgtgatatcctgattgagctgcaggcagcgggctagattgtcatccagaccggtccatgtgtaagacatattttcggcataagtggcccagccttccacataaccaaggaagttcatagcctggcgcaggggatccgggtctgtggcggagaaggcagactgctgatagagatgtccgggatagccttcatgggccagtgtcgtaaaaagggacagattgtcagtaatctggctgttattcaggtaaatcacattgctgtcagtgacatccacaggcggaatcatataaaaggcgggattcatgctgtcttccaatgattcgggaacatatttcagtgtatattggctggaaactgcatccggaaaatcttctttcagcgaggactgaagggtttgaagaataatcttcgggtcgttctctgaaatatcaatggcctcatccagtttgtcggcaaggctgtcgtcggatgacagaagcaatgccatctgaactattgtattctgcagggtatcatccagccattcaatcagttcttcgggggttttgtcggagcctgtctggcttttgacaagatattcatagtattctttgccatggtcaaaataacagaggccattctcattggtaccgctgccttttaaagcttccatgcctttgatcagtgactggtaggcaggaatgacataatcatggacggcctggtcatttcgtttgatataatctgctttgtcgctgtctgacagaccggaaaccgattcgagtttttcaggaaagacttcaatcagcatgttgttgtcggggtcttcaatgaaagactgacaggaagcaatgacttcatctgcagattcatcagacataaagaggccggcatcggctttttcctgttcgtaatcaagtatattgttaaagcagtccggaaaatcctgaagcagaagcagataatcatctacatccgcagggctgtaaaaagcatattcagacatcataaccggcagcaggctctgggtgccggaggtgctgctcagatattccggatagtaaaacagggttttgctgtcataggtttgctctgtttccagaaattcatcgagaatatcgtaagtctgctgttgtttctctgtgagttcttcatagtcaaaatcgtgaagctcctgtctgagcgcatcggtactgatgtcggagacaaatgtatcgatgggattctgcagattaatacgtccaaggtcaatggtatcaaggtcaatatcataggctgaaggatccttgagctcaaaatgcagggtcagggcatctgtgctgactgcatcagtaaaaatttcccgtgtaaaatcatcgaaatccgcattgacttcgtcactggctgtaccgacgctgtaacgttgatcgtacagctcatgggccgcagcggatgtgagcatattggcggatgagcagccgcacagaagcacagatgcggcaatcagaccggcgatcagccggtgaaaagtatttttcatggacagattcctcctaaatgcaagtgcaaaatagtgatgtaaatattataacataggaatagtatggcggtctcctgctatttttatgttattttgcgggttgtattcgagtttgggttatactataattaataactagtacatcgtttttgaaataactacaccattcacttgcctgtgaatcctattgtacaggtagaaaagcctcggcgtagcccgctacgcctgcatttttttacctgcacactcgaatccgcattctacgcgattggtatagttatttacgaaacgatgtactagaatgaattttttgcgcctcggcgcgtgatatatatcaggaggagagaaaaatggcaaagaaaccatattatattacaacggcgattgcctatacatcaggcaagccacatatcggtaatacttatgaaatcgttctggctgacagtattgcacgttttaagagaatgcagggatacgatgtccgtttccagacaggtacagatgagcatggtcagaagattgagatcaaagcaggcgaagcaggtattacaccgaagcagtttgtagacaatgtatccggtcagatcaaggagatctgggatctgatgaatacatcctatgacaagtttatccgtacaacagatgaataccatgagaagcaggttcagaagattttcaagaagctgcatgatcagggtgatatttataagggctactatgaaggcaaatactgtacaccgtgtgaatctttctttacagagagtcagctggtggacggcaagtgtccggactgcggccgcgaagtcattgatgccaaggaagaagcgtatttcttcaaactgagcaagtatgcagacagactgattgattatattaatacacatcctgaatttattcagcctgaatcccgtaagaacgagatgatgaacaacttccttctgccgggtcttcaggatctgtgtgtatccagaacctctttcaaatggggtattccggttgattttgatgacaaacatgttgtttatgtatggatcgatgccctcagcaactacattacaggccttggctatgatgtggacggcaacagcgatgaactctacaagaagtactggccggctgacctgcatctgatcggtaaggatattatccgtttccatacgatttactggccgatcatgctgatggcactggatctgccgctgccaaagcaggtatttggtcatccatggctgctggttggtgatggcaagatgagtaagtcaaagggcaatgtgatttatgcggatgatctggtgaattattttggtgtggatgcagttcgttactttgttctgcatgagatgccgtttgataatgacggttctatcacatgggaactgatggttgaacgtatgaattcagatctggcgaatattctgggcaatcttgtgaaccgtaccatttccatgaacaacaagtatttcggcggtgtgatctccaatccgggtgtaaatgagcctgttgatgatgatctgaaagctgttgcactggcaatgcatgagaaagtggatgccaagatggagaaactcagagtggcagacgcaattactgaagtatttacactgcttagaagatgcaataaatatatcgatgagacagaaccatggaaactggcaaaggatgagacaaaacaggacagactggcaaccgttctctacaatctgatggaaggaatccgtatggcagccgttgcgctggcagcttatctttcggatacatctgccaggattttggatatgctgggcacacaggaaagagattatctgaagcttgaccagttcggacttcttgaaacaggcggaaaggtcgttgaaaaacctgaaattctttttgcaagagtagacatcaaagagctgatggagaaggttgaagcggacaaggcagccaatgcacaggcacagtcggcagcagcaccggcagaagaagctgaaacagaagaaggcattgatatcgagccgaaggcggagattacatttgatgactttgagaagctgcagttccaggtgggcgagattatcgcctgcgaagctgtgaagaaatccaagaagctgctttgctcacaggtgaagatcggcaatcaggtgcgccagattgtttccggcatcagaaagcattattcaccggaagaaatggtaggcaagaaagtcatggttgtgaccaacctgaaaccggcgactctggcgggtgtgaagtctgaaggtatgattctctgtgcagaggatgcagatggcaatctgtctctgatggttccggagaagaagatgcctgccggcgctgagatctgctaataagcggaaaacggattcggcagtaagtcggtcggttgatttggcagccgaagtttaaagcgtgaataagagagcctcagggatgacacggcagagaccgaggttgtttctgaggctttttatgacaatatatcgtgcagacatgttgtctgcacagcagaattttattctgcgtcggaatttgcaggtgagttttgaacaggagaaggaacgttttgggtgtaaagagaggaaatcgtttgtgaatacggaaatgcttgtatttatcatagaaatcattggaacagtggcttttgcctcatccggtgctatggttggcatccgcaaaaaaatggatgttttgggggttattgtgatggctgtcatgaccgctgtcgggggcggaattatcagggatctggtgctgggcattcacccgccgaataccttcaagaacccgatttatgtagagtattcggttctgacagcggtgatactttttgttgttttttatatcaaaaaacaaatgcttgacagcaaggcattgttttattatgagaaaataatgattcttctggatgccatcggtctgggagccttcacggtcattggtgtggaaacagcttatgagatcggctatgtccatcatagatttctgctgttgttcgtgggtgttatcaccggcgttggcggcggtatgattcgtgatatgatggcgcagcagataccatttattctggtaaagcagatttatgcctgtgcatcattggccggggccggcgtctgcatatggctgatgccttaccacaagtctgccagtatgattctgggggcagttgtggtggtgatcatccgtattctggcggccacgtatcgatgggatctgccgaagatcgagtagggattgaagaaattgggtttgccgaagaatgagcagcgcctgatgcgcggggacttattgaagattaagcagaaattgacgaatggagggatagcgcatgatttttgagacacatgctcattatgacgataaaatgtttgatgaagacagggaaagcctgcttgagagtatgcaggaagcggggatcggcaggattgtgaatatcggtgccgatctggcttctacggcttcaagtattgcccttgcggaaaaatatccgtttatttatgcggcagcaggtgtgcatccaagtgatgccgcccagttaaatgagcatacatttcagtggctcagtgagcagacggcccatgagaaagtggtggctgtaggtgaaatcgggctggattactattgggaaaaagacccggaggtcagagccaatcagcgatactggttcaggcgtcagctgaatcttgccagggaaaaggtattgccggtttctatccattcaagggatgcggcgaaggatacattggagattgcaaaggaagaatgtctggcagaaatcggcggcgtagtacactgtttttcttatacagtggaaatggccagagaatatctgaatatgggcatgtacctgggcatcggcggtgttctgacatacaagaatgccagagtgctgaaggaagtggttgactatgcgcctatggacagaatcgtgctggagacggattctccctatctgacacctgtgccgaaccgcggcaagcggaattcttcactgaatctgccgtatgtggtgatggccattgcggagatcaagggtattacgacagcagaggttgaagatatcacctgggagaatgccatgaaattgtatagaatggcagaataaaaagaatattgatttgtaactgttcagagccaagcaaaattttaaaaaacaggtataaaatgcttgcatttttaaaactgtttttgaaattttatttggcggatacgccacaccgacgaaatgcgtagcattttggaggctggctctgaacagttacattgatttttagattagagacatcttttgatatgactttgtataagatacagagaaaatatcaaaggatgtctcttttttgatttcttggattttgagaaaatgcagagaataaaaatctgaaaaaattagaaaataccaattgacaatctctgaaaaagagaatagtaggaacgtccttcttctaaatgaagacgtacaagctttcttttaaactctggttcataaacttgtggcataataaatcactcctaatcgttagtatatcttatcagccaccaatgttacaactatagtttatcacaacaaggctgtctatacctatgatgcatcgggtatccggacatccaagaaggtgaacggcactacaacagaatacctgacagcgggcggcagtgtcctgtctgagaagaagaacggcgtatggcagcattacctgtatgacggcagcggccagctgatggccattcgatataagggtgcggattattattatatccgtgacagtctgatgactatcacaggacttgttgacgccaatggtgtggctgtagtaaactacagatatgacagctggggaacagtgacaggcatcacaggcagcatggcagcaagtcttggtaaggacaacccgtacagatttaaggggtattactatgatgatgagacaggaatgtactatctgaagagccgctattattagccggagatttgcaggtttattagtgcggatgatgaagatgttctgagtgtgaaaacggattttgatgattgtaatctgtatgcctattgtgataataatccaataagtcgtttagatgagaccggtgatgtttggcaagcggcgttagcaggtggatgggttattggaggaagtaatgcttggaatccagttggttagacggtattaggaataataacagctgtttctgtagtatatggagctaaaaagttatataagtttgcaaaatcaaagagaggaacagcacaaccggaattaaagaagcaaggacgtgaaaatcaagaaaaaaagaaacagcaaaataattggaagaaaaagtctggtaaaaaaccgagacagcaacatagaccacatcatccaagtaaaaaaggacatagaaaatattagtttatgttcgaaatttgatatgaggtaaatgaaattgagaaaattatggtattgcacagattggagtatttatatttcaaaaaataagagaagtggaataagaatgcgttttgataaaaatgtagacgttgaggtaaagagagcatgtaaagaatatgtacaatggctaaaaagtatttatcgtttccctgttcgtgtgccaatatattttaaggaaacaaaatatataaaaacatcttcgaaagatttagtttcagctgtgttttttggaccaaatgatttaatggtagaaccatatataaaaattgcagtgggagattataatgatttatgtaaaatccaaggaaaagatgacgcattagcagcaattttatgttcaataacgcatgaattaactcactattttcagtggataaaataccatgaattatggttatcagggggaaaaaaccagtattttgaaagacaagcagtgtattatggcagacaaattgtttatgattatgcagatacgagagaacatccttaactttaaaatatattataaagtattcagataggtgctgaaaatgcattcgcactccacttaaaaaatatttcattggaaatgggaacgaattcattaggaagagtatatggaaagtatacacattcggtaggagatggctatggttatagtaagctgtcaataaagtttccagaaattatggcggttgcagctcttgtaatttatgcaccagaagtattgggagcgattgaaacaattggagcagttatttcaatatttgattaatttataaaggggcgattagatgaatacaggtacagtgcaaataatgtggaaagaaattatagttggtttcattattctttatttacttcgcggagtattagatgtctatatgataaagaaatatgaaaaattacttaagttatttggcgtgattgaaatggatacgcttaagttagaagcagaaaaacatctaaaattatgtaattttttctcagttgggccgtggaataaggctatatattggacatataatggactttgttggttattggcaacaataagttatgttgaagatgatgaatatgattttttagcatatttggggaaagtaaaaaatgagcaggaatttgaaatgaaatcatttgtacttgcactgtattatcgctcaaaaaaggattttaatcaggcaaggcattattatgatgtgtatttgaccagcaaacatgttaataatgatattggagtcataatggatagtgtttggagcggaaaagcaaaaagtgaattggtggctgaaagtgtcaagaaatttgaaaacccggtgttaagaaaactttttgcggaaaatcatattttgtaaaaaggtgttttcaatgccccgcatttcttcgctgcaagaaaaataaactgaaaatatacaaatgaaaaattaagaggaaaggaaattgatgaaagatgagagattttcttgccaatatgacatcagagctgccagtttcctgacagctctgtaatattcaaaaagagaggattggatgggccgctttgttcaaaagtcattgcacgcggccgcatccggttatgaaaaagaaaaaatctatataatgtgttattagcacttgcttttgtttttttatggctttattatagagaagaaatgtggcgaatgtgtgaccgctttctgaaaagaaaatgaaaattcttaacagaaaacagtataaaaggtaaattgtttatttagaaaggtatttttgtatttatggaaaagctatccaatccacagagaacgattgaggttataaagaaatatgaattctgtttccagaagaagtttggacagaatttcctgattgacggacatgttctggacaagattattgccggagccggtgtgacaaaagacgatatggtgctggaaatcggtccgggcatcggaaccatgacacagtatctggcagaggcagcaggcaaggtagtcgcagtggaaatcgacagaaatcttctgcctattttacaggaaacactggcagattatgacaatgtaaaggtgattcacgcggatgtgctgtctcttgatctggagaagctggtgcaggaggaaaatggcggcagaccgattaaggttgtagccaatctgccgtactatattacaacaccgattattatggcattatttgagcagcatgtgccgctggccaatgtgacggtcatggtgcagaaggaagtggcggcccgtatgaaatccggtccgggttccaaggattacggggcattatctctggctgtgcagtattatgcagagccgtatatcgtggccaatgtgccttgtaactgttttatgccgcgcccaaatgtggattctgcagtgattcgtctgacacgttacgaagaaccgccggttcaggtgaaggatgagaagatgctgtttaagattatcagagcgtcctttaatcagcgccgtaagacacttcagaatgggctgaacaattcttctgagctgaattttacaaaggatcagattgcggcagccattgcagaggcgggattttcaccgtctgtgcgaggtgaggcactgacactggaacagtttgcaaagctgacggatattttgctgaaggcttagaaaaagctgcactgcaaactagaaaataaataaaaaactgccttgcagcaggtttaaaggtatcattgatttaaaaagcacaaaacagggattcggatagtgactgtctgaatcctttttttgtgctcttttaggttgtatattaacattgacatatcaggtgtcttgacacctgatatgtcaagctgtataatgacaaaaagcaataaaaacctgatcgggaaagaggtatgaataaaatgaatgaatattatgacgtcattatcgtgggaaccggagcagccggattgtactgcgctttgatgttgccggagcggaagaaaatattgatgctgacaaagcaggaagccgatctgtcagattcttttctggcacagggcggtatttgtatgctccgtggggaagatgattataaagactattttgaagatacgatgcgtgccggacattatgagaataatgaacgtgccgtagatttgatgatccgcagttccaatgatattatcagggatctggttttcagaaaggtggattttgccagaacagcggatggggaacttgatttcacaagagagggtgcccactcaagaccgagaattttgttccataaggatatcacgggcaaggagattacaagtacactgctgaaacaggtcttgacaaaagagaatattgaaatccgtgagcatatgaccatggtggatctgattgagaaggataatatctgcggcggtgtagtagccatggatgaggagaatcatgtttatccgatccgttcacagtatgtggtactggcctgcggcggtatcggcggtttgtaccagaattccaccaattatccgcatattgccggggatggccttggtattgccatgaaacatcaggttgaggtggaacatctggattacatacagatccatccgacgacactcttttccagaagtaagggaagaagattcctgatctctgaatcggtgcgcggggaaggcgcattattatacgacaaaaacggacagcgttttaccaatgaactgcagccgagagatattgtcagccaggcgattttcgcacagatggagaaagatggtacggaatttgttctggaggatatgcgtccgttgggagaaaagaccattagagagcatttcccgaatatttatcagcattgcatagaggaaggatttgacccgatcaaagagccgattccggttgtaccggcccagcattactttatgggtggcattaaggtcgatttgtccagccgcacgtctatgaaaggactttatgcctgcggtgagacaagctgcaatggtgtacacggcaagaatcgtctggccagcaattcgctgctggagtctcttgtgtttgccagaagggcggcctatgatatgctgtttggtcaggccccggatccgtgtcaggcagaaccggatctgaagcgatatgaggataaagaggtattgcttgaagattaccatcaggttgtattagaaggaataggaaggatgcgtggaaatgaatagtattacaatgcagcttcaggcggacaagttgatccgcatggctttggaggaagatattacaagtgaagatgtgtcaaccaatgcggtgatgccgacgaaggttcagggaaccgtagatctgattgccaaggaagacggcgtgatcgcgggtatggatgtatatgccagagtttttaagcttctggatgaagatacagagattgagatgttctgtcatgatggcgatgaggtcagagaaggcaatctgatggcaaaggtgacaggagatatcagggttcttttgtcgggagaaagagttgcgctgaattatctgcagcggatgagcggaattgccacctatacaagaagtgtggcaaagcttctggaaggcagtggtgtgacactgcttgacacacgcaagacgacaccgaattgtcgtgtttttgaaaaatatgcggttcgtgtcggcggcggatgcaatcaccgttacaatctgtccgacggcgttcttttgaaggataatcacatcggggcagcaggcagtattacaaaggctattcagatggcaaaggcatatgcgccgtttgtccgaaagattgagatcgagacagagacactggaacaggttgcggaggctgtagaggccggtgcggatattatcatgttggacaatatgacaccggaagtgatgaagcaggcggtcgctttgattgacggaagagcccagacagagtgttcaggtaatattacaaaggaaaacattgcccgtatttgtgaaatcggcgtggattttgtttccagcggtgcattgacacattctgcgccgatcctggatatttccatgaagcatctgcatgcagtgtgagaggagctgaaagaatgaaaactgcagagagaagaaatgcgattttgaagctccttcaaaacgcagaggagcctgttgcagcgagaaaactggcagaaaggtatggtgtcagtcgtcaggtaattgttcaggatatggcggtgatacgggcttacacaccggggatcatttcaacgaccaagggttatgtgatggagcaggaaccgcgctgtgtaagagaatttaaggtgcggcataagcagagtgatgcggccaaagagctgaatctgattgtggactgcggcggaagagtgtgcaatatcagtatcagccatagagtttatggccgtgtcagtgcggagatggatattcgctcaaggcaggatgtaacagaatttattgctgctttaaatgacagtcagtctacggttctgagtacagccacatccggttatcattatcatctggtggaggctgccagcgaagaacgtctggatctgatcggcgaacagctgaaagcggccggttttctggcaccgcttcgaccatgggaacagaagaaaggggaataaagaagatgacaattgcggaaattcagcaggaaatcatgcgcatgaaaaaggaacaggatatctgtattctggcgcatgcttatcagggacaggagatactggaagtggctgattatatgggagattcttatggtttgagcgtgcaggcatcaaagagtgactgcaagggtgtgatcatgtgcggtgtgcgctttatggcagagacctgcaaggttctcagcccggacaaaaaggtatggctggcgaatcctgcagccggatgtccgatggcagaacagctggatctggaaggccttcgtgaattaaaagcaaagtatccggattatgcagttgtggcttatattaatacaacctctgaattaaagacagaatgtgatgtctgcgtcacatcttcttccgcggttcagatctgcagccgtctggacaatgacaagattctttttatcccggatccgaatctgggccgttatgtggcagagcagatgccggagaaaacatttgccttttataagggcggatgtccgagacatatcgtggtcagcgccaaagatgtggagaaagcgcgcaaggcccatccgaatgcactgcttctggtgcatccggaatgccgtcaggaagtggttgaacaggccgattatgtcggatccacaacaggtattatgaattatgccaagaaatctgactgcagagaatttattatcggaacggaaaacagtattgtagaacatctgcagtttgactgtccggacaagtccttctatccgttggctgttccactgacatgtatgaatatgaagatcacaacactgatggatatttataaatgtctgaaaggctgcggcggagaagaaatccagctgcctgagaatgtgattgaaggtgccggaagatgcatccgaagaatggtggaattgggcgaatagcagacaggcgggaatacggacagatggctgtaaggcctgaatgcacataaaaatgggacgtgtgaaatatgcatacttatgtttcacacgtcctatttatgtttggattattatgcaattatgcattgcgtgcagattttctggcttcgcgttttctttcaagattggatacaataatacagcagctggcatcgccggtgatattgacaactgtacgtcccatatcaaagattctgtcgacacctgcaaccagggcaataccgtcaaccggcagaccaacggaagtcaggaccatggccagcatgaccatacctgcaccgggaacaccggcagtaccgatggaagccagtgtggctgtcagaacaacggtgagcatctgggtcggcgtcagtgtgatgccgtaacaggaagcgatgaagatcgcacagacaccctgataaatggctgtaccgtccatgttgatggtcgcacccagcggcagaacgaaagaagaaatctctctggaagcaccaagtccttccacacattccaggttgatcggaagtgttcccacggaagaagaactggagaaggcaaacatcattgccggaagcatgcctttgaagaacttcagtgggcttaatccgccgatggccttgactgccagggaatatacaacggccacatggatcacatagcagagataagcggtcaggaggaccatcgccagagaggcgataatgttggaaccgttggcagcaatgaccgggcagagcagacagaagacaccgattggtgacagcttgaggatcagttccatactcttcataaagacttcattcaggtcgttgatggcggttaccagtcggctgtttttttctgaaccgatcagaatgatcgaaaaaccaaagattaatgccataacaatgacctgaagcatgttggattcagacattggggcaataaaattagatggaaaaatattgacaattgtatccatcagggaaggagcctcagtgacctcataggaaagatctgttgtcgctacgacaggaaaggcatttttgaaaaggttaccgaaaagcagtccgaatgtgatggcaaaagcagttgtacagaagtagtaaataactgtttttaatccaatggaaccgaccttcttgatatcactcatggagatgataccgctcataatagagaaaaggacaatcggtacaacaataaacttcagcaagttcagaaagatcgtaccaaatggtttgatatagttttcagcaaactcagcatggctctgcatcagcagaccggcaatgatggccagaatcaaagcaataaaaatctgtccggccagagaaagtttcttcttttttttcattttagtgttctcactttcaggaaatctaaatctatatgtttcacatttatattcaggataaacgtctaaaaatagcgcaaccttaccaatcatagcagaattttcggggtgaatcaacaaaaaatgattttttttaatgataaaatttcatttccacccaattttttatttaaaaatggtataatagcgttgaaatttgcaggaaaaaaggatgaaattcttatgttttacaaaatatgggagtgaaaatctaagtcatgatgctatttgagatgaaaagaattcgtgacaggaaggatcatacgcgattacgaacctgaggaggccattcgggagctgaaaaaacgatgtgcaatggacaacaacgtggtacaataaaaaggcaatctattcaaaatttaaagttaaggtaggaattaagatgcagacaataacactggaggaagcgcaggcacgattactggaagtcgttcattgtgtcatgtcggaaaaggtcgaattattaagaagtatcgacagaattctggcagaagatgtgtatgcacatgtcagtcagccgccttttgaacggtcggctatggatggttatgctgttagaagtgaagatatacggacagtgagcagaagcaatccggtctgtctgaaagtcattgaccgggtttgtgccggagaagtgacggacaaaagcgtacatgccggtgaggccattcggattatgaccggtgctatgataccggaaggtgcggattgtgttgtcaaacaggaggacacggattatggtcaggaacaggtcaaaatttatgtgtcattggctcaaaaaatgaattgctgccccgtaggcgaggactttcaccagggcgactgccttggctgggaaggggaaaaagtcgatgcttatatgatggcttccatggcatccggaggaatagacagtgttccggtgagaaggaaagtccgtgcggcggtgattacaaccggtgaggagttgatgccgcatgggcagccgttgcttcccggaaaaatctataatgccaatctggcttatctgacaggcagacttctgcagcttgactgcaatctgacggaggggatctttgtcggtgatgatgcggataaaataacagcggcagtagaaaaatgtgcagaagaggcagatgtgatattgacaacgggcggtgtatctgtcggggtcaaagacttattgccggagattatgaagaaactgggtgcagacattttgttccatggtattgatttaaaaccgggcatgcccacaatggcatctttatatgccgggaaaccagtcatttccctgtccgggaatcccttctctgcatctgctgtatttgagctgctgatgcagccgttattgcagaagatgacaggaagccaacaaacatctttggtgaaaaaagaagctgacattgcttatgattacccaggcaataaaggcagtcgtcgggtattaaaagcctatgacgatggacatgccgttcacatcacaaaagggcagcataacgctcagatgcgtcaggggatcggaaccaactgccttgtcgatatgccggcggggacagggccattgaaagccggggataaagtccatatctggagattataaaaaagatggggctgtcggaaagtagacagccccatctttttaggcgttgagaatattcatgaactcttcgccggtaatggtttctttgtcatagaggaagtgagccaattcatccagtttcgcacgattttcaatcagaatctgaagggctttctgatgctgctgtttcaccagttcaacgaccttgtggtcaatttcagcctgagtttcagcagaacatgccagagaggcgtcaccgccaagatactggttggtgactgtttcaagggcaaccatgtcgaagtcctcattcataccgtagcgggtgatcatggcacgggcaaggcgggttgcctgttcgatatcattggaagcccctgttgtgacggagccgaagataacttcttcagcggcacgaccacctgtaaatgtagcgatcttattctcaatttcttctttgctcatcagatagtgattgccttcatccacctgcatggtgtaaccaagggcaccggatgttctcggaataatcgtgatcttctggacaggcgcagaattgttctgttttgcagccacaagcgcatgtccgatttcgtggtaggaaacaataagcttctctttgttggtgaggatcgcatttttcttctggtaaccggcaataacggtttcaatactttcttccaaatcggcctgcgttgcaaagcgtcgattgtcacggactgcgcgaagcgctgcttcgttgacaatattcgccagttcggcaccggaagcaccggaagccatacgggcaatcttattaaaatcgatatcgtcagaaagacgaatcttcttggcatggactttcagaatttcttcacggcccttcaaatcaggcagttcaacaggcacacgtctgtcaaaacgtcccggacgggtcagggcaggatccagagattcgggtctgttggtagctgcaagaataataacacctgtgttgccttcaaaaccatccatctcagtcagcagctgattcagtgtctgttcacgttcatcattgccgccgatctggccgtcacgcttcttgccgatggcatcgatttcatcaataaaaacgatacatggcgctttctccttcgcctgtttgaacaggtcacggaccttggaagcacccatacctacgaacatttcgacaaattctgaaccggacatggagaaaaacggcacattggattcaccggcaacagccttggcaagcattgtcttacctgttccgggagggcctacaaggagaatacccttcggcatggaagcaccgatctccttgtatttattcggattgtggagataatccacaatttctgtcaggttctctttggcttcatcttcaccggcaacatcggagaatttgatgccttcggtggatttcacataaatcttggcgttgctcttgcccataccaaacatcatggaatctttgccgccgcccatcttgttcatgagcttcttggacatatactggcccagggcaaagaaaatgaccaatgggagaatccatgtgagcaggaaactgaccagtggggacatctgttcaataatctcgctggagaattctgcaccggattcataaagtcgttctgtacggttcggatcatccatcagaccggtcttgtaaatctgggattcatccttattcgtgaaaacaatctgattgctttcaatttcaactttgccaatctctttcttctcagtcatgctgatgaaagtgccgtaatcgacctctttcacgctgtgctgctgaatcagcggcataatgaatgtattgagaataatgaggatgagcagaacgattgtatagtagtaaaaccaattcttttttggagttttgacttcattcataatattcggcctccttataatgcatgtttctaataattctacattatatcattatatccaaaaatataccatgcacaatctcttataaatctgtttaataattgaaaatattaagaaatataaataatatttttattaaatctttagttgacgggagaaatgataccatgcatacttatagtagagggggtatgcctgcaccggctatgatggagagaagcggtgcagacagtgtacggagaattgatgggggagaaatatgcgattaatgttatcttatctcaagcgctataaagggcttgtttttttaaactttatttctgtttttgggtttgcattgacagaactgggtattccgacgattatctccagaatggttgacggcggtgtagccagtggggatcgggaatatctgctgaaaatgggtgggctgatcgctctgatttcggttgtgggcattctcggaacggttgtcctcggctattgcggtgccaggatttctacagcggtcacctgcgatatcagaaatgatctttttgaaaaggttcagagtttttctcatcgggaaatgaatcagctgggtgtttcttcactgatcacaaggacgagtaatgatgcacttcagattatgaattttatgaatatcattctgagaacggcaatgctgacaccggtcatgatcgcggtcagttttacgctgatcatcatgtcatcggtgaaattatcgctgatcattgcggcgacagtgccttttattattctgggtgtcatacttgttgctaaaatatccggtccggtcagtgaacgtcagcagacggcattagatggcctgaatcgtattttcagagagaatctgacaggaatccgggtgatccgtgcttttaataatgatgcccgtgagacagaacgtttcggggaacagaatcaggcgtttacaaatcagtccaaaaagctgttcacattgatgagttctacggaaccgctgttttttcttctgatgaatattgcagcattggcgatttattttgttgccagtcagatgatcgatcagagtgcgctgcaggtggggcagctgatggcgtttatggaatacctgtttcatgccatgttctcagtgatgctgttctgccttgtgttcatgatgtatccccgtgcgaatatttcggccaaacgtatagaggcagtgatgaatatgacgccggatatcacaaatgagactgtcagcacgcagcgtgtacatgacgatagagaacctataaaagaagttatatttgaacatgttgatttctgttatccggatggggaagaagcggttctgaaagatatttctttttctgccagggccggacagacaacggctattatcggaagtaccggttccggaaagagcacattgatccagctgatcccgagattttatgacgtgaccggcggacgtgttctggtcaatggcgtggatgtcagacagatcaacagtcataagctgcgtgaacatatcggatttgttgcacagaaggcgaatttgttcagtggcaccattgaggaaaatattcgtttcggttgctctgaagcaacggatgaggaaatacggcatgctgctgatattgcgcaggcagcggattttattatggataagccaaagggttttaaagaacggattgtagagggagcaggcaatttgtccggcggacagaagcagcgcctgtctattgcaagggcgctggtcagaaaaccggatatttatatttacgacgattcattttcagcactggatatgaaaacagatgctgtactgcgtcaggcattaaaaccggaagtgaagaatgcgattgttatcattgttgcccaacgtgtttcgacaattatggaagcggatcagatccttgttctggatgaggggcgtctggcagcatcgggccgccatgaggaattattaaaaacatgcccgctttactatgaaattgcagcatctcagctgagtgaggaggaactgcaaaatgtctgttgatcgaactgaaaataaaaacgacaggaagggacttgcccaggtgggttactgcctcaaatatctgatgaattttttgcgtccgtataaaggcggcctgatccttggtctgctgatggttgtcgtggccaatataacatttgcggtgatgccggtggtggagggagagatgacaacacagctctttagtgacggggaagcgatactgaagggcgtggaaggtgcacatgttcattttgatgtgattttcggaatcatggggacgctggtgattatttatatcatcaaaacagtttctcagctgatcacggctgtttttctgacgcgggtgctgcagcaggccatgtgtgatatccgcaatgctttgcagaaaaagattcagcggctgccggtgcgttattttgatgatcatgcttttggggatgtactcagttgtgtgaccaatgatgtggatacgctgagcaatgcgctgcaggaaaccctgcagagagttctggcagcgattctgaccttcatttttgttatagggatgatgttttacattcacaccattttggcctgtatagcgattttgatcattccgctgtcactgattgtgacccggttttttgtaacgagatcacagaaattatttgatacacagcaggaaacactgggggagctgaatggtacgatcacggagatgtacggcggttttaatgaaatcattttatataacaggcagaaaatggctctggataaatttcacgatgtgaatgacaggatgcggaaggcttcttttagggcacaatttgcatcctccctgatctcgccgtgtatttctctgatcacgtatctgattatcggttctgtggctgtaacgggctgtttgtttgtcatgaatggaacgcttttgcttggcaatcttcaggcctttgtccgttatatctggcagatcaatgaccctctgtcacagatttcccaattgtcttcacaggtacagtctgcctttgcggccatgggaagaatttttaatctgatggatgaggaagaggaagtacagaatggcaaagtcgagatccgaccggacaaagtccggggtgaagtcacttttgatcatgttgtttttgggtatgatgatgaaacattaatgcgggatgtgaattttcaggcgaagccgggaaagatggtggcgattgtaggaccgaccggggcaggcaaaacaacattgatgaatttgctgctgcgtttttatgatgtaaagggcggagctatcaaaattgacggtattgatatccgggatatgaacagggaagaactgagacagcttttttcattggtactgcaggatacatggctgtttaagggcagtatttatgataatattcattacggaaggctgacagccagaaaggatgaagttatttccgctgccaaaatggccaatgtgcatcattttatcaaaacactgaccggcggttacaactttgagatcaatgaggaaagcagtaatatttcacagggagagaagcagcttttgacgattgcaagggcgattctgaaagatccccggatcatcattctggatgaagcaacttcgtctgtggatacccgtctggagaaaatgctgcaggatgccatgcataaagtcatggacggcagaacatcctttgtgatcgcccatcgtctgtcaactgtcagaaatgcggatctgattcttgtggttgaccatggtgatattgtggagcaggggactcatgaggaacttctggcgaaaaaaggtgtttacgaaaatttatatcacagcggcacatcacttgcgaatcatcagccagtgtgctaagatagagattaattgtaattatctaaacaatgaattacaaaagaaatttgacaacatgaagctatttatatggaggaaatgttatgagcagcaaaagacgaagaaaaaaagcccgagttccgggattgatcattactattatattgctgttgcttgtcgctgaatttgtaggacttttggcgattacaaaacttttgccggtctatctgctttttgcagtaggcattgtatttatgacctgtgtattgctggtggcaatgctgacagggaatttcaggaagaaagtccgatttattatcggtgcaattctgggcgttttgcttcttgcaattctgcttttgggcaatctttatgtgatgagcacctataatacgttgaataagatatcaggtgtgaatacgcagacttctcagatcggtgtttatgtattgaaggatgattcagcccagtctattgaggatgcaaagagttatacttttggtactttaagcaatctggatacagagaacacacaggctgctgtcaagcagatagaagagcgtaccggtcagtctgtaaagacacaggaagaaaatggtgtaacaaagcttgtggacagcctgctggacggcagttgtgatgcgatcattctgaatcatgcttacctgcctgtacttgaggacatggaaggttatgcagatatcgaggataagatcagagaactggatcttctgagtgttgatgtggagattaagacagatgacaccgcttcttcagatgatacagcgaaacagacagatccggataatattatccgtctgtatatcagcggtattgataccagaggcagtgagatcattaatacgcgaagcgatgtcaatatcattgcaacgatcaatacagataccaagcagatgctgcttgtgtctacaccgcgtgattattttgtaccgctgtctatttccaatggtgtaccggataagctgactcatgccggtatttacggtattgatgtttctatggatacactgggtatgctctatgatatttctctggacgattatttccgtgtgaactttgccggatttatcaagattattgatgcacttggcggtgtggatgttaattcagaggaagcgtttaccgcatatacagacagccgatactcttatacaaagggcattaatcatctgggtggtgaagcagcactggcatatgcacgtgagagatacgctttctcagatggtgaccgtgcaagaggacgtcatcagatggaagttatcagtgcggttatgcagaaagcattatcgcctgatatcctgagtcattacacagatgtactggccggtatcgatggttgctttgagacaaacttctcctatgaccgtctggccgaactggtacgtcagcagctgacagacagcggaagctggaatattgtcagttacagtgtaaacggcagcggtgatacaagacagccgtattccatgagcgctaatgcctatgttatgataccggatcagacaactgttgataaagcgaaagagctgatgcagcaggttgttgatggagaggttattaatctgaacgaatagtctggatggagtggacggcatgaattatgtagttgtggattttgaatggaatcaggcttgttatggcaagggatctgagaatcgaaagataccctttgagatcattgagattggtgcagtgaagctggatgagaacttgaaggagattgaccgtttcagccggaccattcgtccgaaagtatacaagaaactgcattatattacacgggatctgacagggattacccaggaggagctgtgtgccagcgatccgttttcttatgtactggtagattttatgctgtggtgcggcaaggattatattttctgcacatggggcaatatggacctggtggaattgcagcgcaacatgaaatactatggcctgttggatcttttgaaggggccggtcaaatattacaacgtgcagaagttttttcgattactttgtgcgcatgatgcatcggcggtatctcttgaatcggcagttgattattttcagctgccgaaagaggccggttttcatcgggcggtcaatgatgcggcttatacggcagacgttttccgcaggattgatcaggaagaagcgaagaagctctactcgattgattattatcagaatccgcagagtaaaggggatgagatccatcttcgatatgattcctattacaagtatatttccagagtttttgatacgagagaagaagcattggcggacagggaagtgcgttcaacaaaatgttataagtgcggacgtgcagcaaggaagaaaatgcattggttttcggcaagaacgaaagcgtactattgtctggccgattgcccggaacatggttatatacgcggcaaactgagaattaagaaagatgatgagcagcatatctatattgtcaagacattgcggctgatcgatgaagagggtgcgcagcaattgcgccaaatgaaagcagatgttttgaaaaagcgtcgtgagcgcaggcaaaaaggctgtcaatgtcactgaagcagcttcagtggcattgacagccttttgtactaatgggattgattgaaatcccgcagtgtatcgtgcatttgttccagcaaagtatctacacggccataataaggcagcggctgacgtttgccggataacttgcgtcggatctgtttaagctcaagaataatggcatcaatatcccgcacacccttcttatctttcagaaggtattccatggctttctgattcccatcatctgtaatcttatcatagatgaccttaatgttcggtttctcaccgatataacggaaagtgatattcggggatgcgtgattcagcaaattctggatatactgaatatcaccggtttccttgtaataacgccacgcgaaagtctttcgcatggtctgcgtaccaatggactttaatccaatcttgtttcctgtttgtttaaagatgcggtaagcctgttcacgagacagaggcctattcgtgctggcatatccggtaatcagatattcatcatcatctctgccgtcaataaagtcagtaattacagcctgaagttccggctttaatgggaaagcctgttcaatctgccgtgttccgatcacagcaatcaacatatccttgccgcgtacgtctttcaccttaaattgtagaatgtcctgcagctgtaatcctgttccgattccgatctcaaataaaatataatatttgtcatcaacagatcttaatgtgtctctaaatttttggagtgtttcgtcatctttaatcggagcgacccagttcatatattcacctcgtataaaacgtatcctcgtagtgaagaggtagactattcactacattatattaatcccattataacacggatgcattttaaatcaagtgatttatcaaacttcagttatattcgacaatgatattatttatttttaatattttttttgatgcgttcattgcggagacgcttatatttatggcggtgatagctgcgttttaaaacatgatacagccagatcaggatcagggtaaataaagcgaaagcaacaagcatgcataatataaacagtatcatatgttgcatggcaaaagtcatgagtttgctcttcagatgggaggcaagcactttaggagaaagcgaggtgcgtgcatcaggaaccgctgcttctgtctcagtttctgtctctgtcagcggagcaaaggcagggagatcttctgtttcaccggaatgagcaaaggccgaagtctctgtttcggtatttgcagcagtgtctgccatttgggccattaactgatcataatgatcgaagcagtagtccatggcattaatggtatccggataaatgtgaccgtcggaattctccatcacaacacaggcaagggtgtgaccgtccttttcagcataggtaacaagggtgttcttagcttcggatgtatagcctgtcttccctccgatgcaggcatcataatgatatttggtatacatcagcatctgatgtttgtgactgagggggaatccctccggacgcaggttggtggaagctaccgtgtattctgtacagccggtaatttcacgaaatgtcggattctgaattgcttctctggaaataagtgccatatcatgggcacttgtataatgatccgggtcatgaagaccgttgggattgacaaaatgtgtattcgtacagccaagtgttttcgcacgctcattcatcaggtcgcagaaagcactgacggagccgctgacaaacttggcggcaccattgcagacttcattggcagatgacataagaatagcatgcagggcgtcattaactgtcagctgttcaccattcaatatgccgatattcatatcattataataattcagaccattccagcaatcctgggagaaggtaatcgtgtcatcaagattggcattctcaataagcagaagcccggtcagtaccttggtgatactggccggataatgccggtcgtccatatttttataataaagaatttcaccggaatcaacatcaatgacgcaggcggcgctggaataaaggataatgtcgtcagttgacactttatctgtcggcagaatcacggggctggcctgtgtttcaggaacagtttctgatgctgctgtttctgaatcagaggattttgtttcgtctgcataggtgtccgtggagaaccacagacagccggataaaataaaaagaagcactgtaaagaggctgattaattttttcatattataaatatctcctggaaatagtattacccgaaataatagtataggatttcagcttaaaagtcaaattctatcttttgccataaggcgtcagatcaagaaaaaaaggtgattattgaatatgcattcgacatgtgttaaacttgattgcatacgagaaatttgcggacgaaatgatgaaaattgtttggataggatagacatcattggataaaaaatggtacagaaacagcgataaggaaaggatgatcagagaatgttaagtaaagagatgcaggaaaagttgatgggagaaattaagcgaagtgacaaatttattgaacttatcggtattaaaatcatagaagctgatgagggctattgcaaggcagaacttgaagtggacgatcgtcatttgaacccgctgggaacggtgcatggcggatgcctgtacacactggcggatacagtcgccggttttgctgcagcctcatgtggttttgagggtccgacactttcaggcaatatgtattttctcagaccgacaatgggtgtgaagaaactgacatgtgaaagccgtgttgtgaaaaacggcaagcgtatccgtgttgttgaggcaacaatctatggtgataatggacaggaaattgcaagaagccttctggaatatatggatatgcagagagaaatgattgtaaaataggcgcgagatccgaataaaacgataaaaaatttctatgaatgagataaatatttaacggggctgcatttatttacactcttgctggaatgtgataaaatgtattacattcaacatgagacgtgtatcccagagcgtacagtgcagaggccaacctgcaggctgacagataagggatataaaggaagcacagctgtgaacataagcttcagctgctgagaaaatagagtgtatggaggtagtatttatgttaactggagcacaggtaatggttaaatgtctggaagccgagggcatcaaggctgtgttcggctacccgggtgttgcgatctgtcctttttatgacagtttatatgattcaggtatcaggaatattttagttagacaggaacagaatggcggtcatatggccagcggttatgcccgggtgacgaggaagccggcggtctgtgtggcaacttcgggaccgggggcaacgaatctgatcacagcactggcaacagcttatgctgacagtattccgctgatcgcgatcacaggacaggtttcaagtgaattgctgggcaaggatgtatttcaggaagcagatattactggttctgcagaaccctttgttaaatacagttatcttgtcagagatgccagagagattccacgtattttcaaggaagctttccacattgcatctacgggacgccgcggtccggtgctgattgatgtgccgctggatgttcagcagaaacagattgattatgtgccggtgaatgaagtcagcattcgtggctataaaccgacagtgaaaggcaataatcttcagattcgcaaggttgtggacgtactggcacatgcacataaaccgctgatctgcgtgggcggcggtacgattctcggcaatggcgaacaggttgtccgtgaattcgccaataaattccatattccggtcgtatcaacgatgatgggtatcggtgttatgccgaatgatgatgatttatatatgggtatgttgggtacaaacggcaagccacatgccaactatgctgtccatgagtgtgatgtgcttgtgcttgtcggtgcaagagtggcagaccgtgcggttgtcaaaccttacaagcttgagagaagaaatacaaccatcgttcatattgacgtggatccggctgagatcggcaagaatctcggtacgacggtacctctggtcggagatgtccatgtaatttttgagaatcttctgcagtatgagattccgggagattacacagcgtggaatgaagagctggcagagaagaaggcagcttatgtggatagacgtcatttcaatccggattttgtcaatccatgtcgttttgtccagacattgagcagcaagatgaatgatgatgccatttatgtggctgatgtgggacagaatcagctctggtcagcagataattatgtcatgaagcatggacgtttcctgacaacaggcggttttggcacaatgggctattccatcccagcagctattggtgtacgtgccgcattgccggatacacagatcgttgctgtctgcggtgatggttctttccagatgtctctgatggaactggctaccatgcgtcagtggaacctgccgatcaagtttgttattatgagaaacggctatcttggtctggtacgtgaataccagcatcatacgtatcatgatcgttacagcggggtttctcttgacggcagtcctgactttgaaaagattgcggatgcttacggactggattatttccaccttgagcataacgatgagatggagcagagaatagatgaatttcttgcatgtgagcatgcagccatgatggtctgcgaggtttacagttttgatttggtaaaggagtaataggcggatgaaaggaatattttcggtattagtagagaataaagccggtgtattgagcaaaaccgccggattatttgccagaagaggttttaacatcgacagtcttgctgtaggtgagactgatgatagagatatttccagtatgaccatcatctcaaccggggatgagcgtatcatggaacagatcgagaaacagctgaacaagaagattgatgttattaaggttcgccgttttgcagagaataaatgtgtaacaagagaacttctgatgctgaaggtgacgtatacgaatgtgacaagatcagatattatggagatctgcaatattacaggtgcccatattgctgacctttctccgaagtccatggtcattgagctgacagccaagacatcgaagatcgatcgatttatcaagctgatgcagccatttggcatcattgagatggcacgtacaggtgcactggccgtgcagagagattccaacgaataggcaggttttttatgagacttagaaatgtaagaggttccagggagacaattgcagcagatgaatgcgttctgcatgatcctgaggagcagcgggcacagaagggccgctggcatgaacttttcggcaatgaccatccgatccacattgaagtcggcatgggtaaaggtcagtttatcatgacgctggcacagcagaacccggatattaattatattggtattgagaagtattcaagcgtgcttgtgcgtgctttggagaaataccatacatatgagggcgacaatattttcttccttcgcatggatgcggaagagattgcggatgtttttgatgagaatgaagtaggcaggatttatttgaatttctcagatccatggccgaaggatcgccatgctaaacgtcgtttgacttccaaggaatactgggcacgatatgatcggattctctgcccggagggacgtgtgatcttcaagacagacaatcgtccgttattcgacttttcactggagcaggtggaagtggccggctggcagctggacaactatacgtttgacctgcatcacagtgaatatgcggaaggcaacgttatgactgaatatgaggagcgctttacagccaagggcaatccaatttgtcgtctggtggcacacagagatccgcaaaaaaaaggatagagcgcagaaaacagaccttagacggatttgtgaaacattcaggatttttcgaaaacatataaaattcccctcttcacagcaggcacgttcgcactgcctaacactgtcagcggtacataagatgccaaaggacggcatctaagtaccggacgtgttaggagcacctgctgtgaagaggggaatttctatatgtttacccgagaattgagtgtttcacaaatcctgtttcatgaagtttttgactgcacgctttggatttgaagcgctaggtgctggataatgtttagaagaagataatgtttcgaaaacgatatttcagattgcggcataagatagtaataggaaatttgaattccgaagggggatgcatggcttcttttaagcaaaaaatggcgaataaggcagtgctgtttgcttatgaccataaacaaatttcgaagcgcgggaaacggttgggggattcttataaagaagtgaaaaagacaattgaaaatattggcaaggataaaacacgctaaaagttgttgtttcatataagagacatcttttgatatgactttgtataagatacagagaaaatatcaaaggatgtctctttttttgatttcttggattttgagaaaatacagagaataaaaatctgaaaaaattagaaaatacctattgacaatctctgaaaatgggaatataataacctcaacatcacggaaactaagaaaattagataagacattcttcaaatgtaagaatgcatgcaagaaagaatgtctgagaaaagcagaactcaatgcggaaaacctgtttctgaaaattcgagaatgcagttggaattacgggctggggctgccgtgatgatatagcaaatatccggatctttgcacgaaactttatatatgacagaacaaaagaaaaaggagaaagaacaatgagtaaagaattaatgaatactacagagatgaaagaagttatttcaaaaagaacggcctgcatgaaggtgtttgaacatgcagaccaccgttttacagcggccatttacggcacaccggtccactacatgaaggacggtcattgggaagagatcgacaaccgcctggaagcggcagctgatgaagtgccggctgatgcggatgatatggaaaatatttcaggggccttcagagtccgtctgtccaacaaggtgaagaaaaagcagatggtttcactgggagagggcagcagaaagctcacatggggttttgtggatgccaattccgtgaaacgccagattttaaaggaaacggaggagcagcagccggatagtgccggtgcgttggagcatacggcagacagtgaaaaggacccgacagcggcctatgctgtcagacatttaaagagccgcatcctttatccggaagccttccagggtgtggatatccgatacaccatcggcccggaaagcctgaaagaagatctggtcttaaagcaggcagacgcagtgcatgctttcacatggcgctatgccccgagtgggttaaaggccagacaggaaggtgcggatatcgtttttgaggatgcagggggcagggaagcctacagactgtctgcaccgtatatgacggatgccgcaggggaagtgagccacggcctgacactgaccctgacagatgacggcggagaaaagaacaaggaggcgtatgtgagactggaagcggatgccaaatggcttgcggcagaagaaagagcatatccggtggtcattgacccggtggtgaccaccgatgtggccagggataagatccaggactgccatgtctcttctttctacaatacagacaatttttacaacagccatatcctgaagacaggcagggtggacggttccgtcctcagaagctacctgaagttcaccctcccgcagctcaacaaagcttctgagatggtgacatccgcctggtatgtggccatcagacgcccgggcggctcggaccagcgccgcattgatatccaccgtgtgacaaaggactggaacagtaagactgtcacatgggacaacaaaccgtcttacgacccgaaagtggcggactatatcgctttttcaggttctggactgacaagactggtctttgatatcacaggtgtggtaaaagactggtatgcggatgggaagaactacggcctgatgatgaaagagcatggggaggaagaaggtacgtataacgaatacatttcatctgatgacaatctggatgataatgcggccacacgtccccagatcatgatccagtacgtaagctgcgagggcctggaggatttctggacgtatcaccagcatgatatcggcagggccggtacaggctatgtgaatgattataacggcagccagatcctggtgcatccgacttatgccctttccggcagccgtgcacctatcagcctgagccatgtgttcaacagcagtgaacagggggcggatatcggttacggcaaaggcttccgtctgaactaccaccagaccatgacggcgaagaagatcggaagtacagactattactgccagactgacggtgacggtacgagaagatattttgccaaggatacaacagacagcaagtggaaggatgagctggatcagacccgtatcctgacactggattcatccaacagatataccgtgacggataaggacggcggcaaacagcactttttaaacgggctgcttgtaaaggaggaagatgcttccggcaacacgctgtcgatcttacacaacgcatcgaagatcgtgaagctgacagacggctccggccgtgaagtcaatctggcctatggcagtgacggccatctgtccaaactgacggatgcggcaggcagggtaacaacatttggttataccaacggtttcctgacatccatcacagacccggacggtgccgtgagccgctttacttatgacacggcagcgggcaagggcatgatgctgacagcggcagacccttacggctataaagtacagtacagctatggcagccgggccccttacagggtcagcaaagtcacggaatatgccggcagcacagagggacagagcctggcactggcttacggacataaccggacaagctttacagacagcaaaggaagaaaagaagtctatctctttgacaattcagggcgtaccgtcagtgtgcgcaatgatgccggttacggtgccgcatggcagtatctggatacggcaaagaataagaacaaactgtccgcagccacagacctgcgctatgtatccccgcagtatctgaggggcgtcacaggcggtgtggcaggctggacacgttacagcaatgcggatcacgttgtggtggaggacagcacagcaggggaaggttatatcggcacaaagtgtatccgcatccgcagcacagcggtctccggtgacggtgcagcctaccagaacctgacggtaaaggcaggaaagcgatatgtcttttccgcttatgtcagagccagcgtcagtgaactggcggcaaaagggcgtatctggctgcagatagaggatacagcaaagaacctggcggtcgtggcggattcaggcagcatcacggcgggtacggagggctttaagcgcctgtcagtggcctttacggcaccggataacgggacaggcaatggcacatcctccttaaggatccttgccaggacccgcaatttcaagggaactgcatggtttgacggcctccagatggaagaaggggaggctgcgggacgcctgaacctggtttccaacaactgcttccagaatggcatgacggaccatacagccttacagttcgctggcggtgacggcgtgttaaagaccggtgcggcggcacaggtgccgaccgtcttaaaaggcactgttaatgaggataaagtcaacatccgtgctgcggcgggtacggcttacccggcacttgtcatggcaccgaagggcaccagtgccacgatccacggtgcggattatgacagtgacggctctatctggtatgccatccgtgcaaagatcggcaataagacctatgacggctatatgaaaggcacttatctgaacctgtccatttcaggggcggttgtgacagtcaggggtatggttgcggcagacaacctgaacctgcgtgcaggtgcaggcaccggctacagcgcaaagatcatgatggcggcaggcacagccgtgggcatcaaaggtgcggcaaaagacagcagcggcacgaagtggtaccgtctggcctttactaaaaatggcacacagtatgatggctatgcatctgcagattatgtggcggtcatgcgtccatccacttcccatgcggcaccgtctggtacgctgaatgtccgaacagaaccgaatacctcctgttctgtggctgtccagatcggcagcagtgacaaggtaaatatcgtcagccatgccggtttaaagaacggagacctgtggtacggtgtgaaactgaccaaaggaggcaaagcctacaccggttatgtgctgtctgatcttgtgacggtttcatctacagatgttcctgcagagatccggatgggacagcaggaaaaagtaccgggcggaaacggcccgacaggggacagcgttttaaagatcacaggggatgagaagaacaacaagcgctgctatcagccactggccatctccggcaaaaagggcgactgcttcatggcctgcggctggggctatgccgacagcgtgagcctgaaagagaagttctttgagagcgatccccatgcgggcaacagcttaaacagcaggaagaaccgtcatttcggcctccatatcaacttcatatccagcgatgccaatgacaggaatgacatccactatgcggaattcggggcagactgcagtgaatggcagttcatgaacaccgcctttgtagccagacatgactatgtgcgtgtggatatcggcttcgcatacggcagcaacagcaacaatgcctactttacgggccttggcctttataaagaagagtatggcacaagctttgcctatgatgacaagggcaatgtggtgaaggtgacggaccaggcgaagaaaaacagcagttttgaatatgacacagcggataacttaaagaagctcatggacccgaagggtaatgcttttaagtatgactatgataaaaaacaccgtgtgacaggggcggcatctgcggcaggcatgaaatatacctttgtctatgatgattatggtaatccggtgacagcgagaacggttgatccgtcggcagagacggatgcgaagaaagccatgacatcaaaggcggtctatacaacaggcacggcggaaggacagtacatggcctcacagacttcgccggaaggttcggtggttacatacgaatgggatacagcaagaggccagatgaatagcacaacagatgcagctggaaataaagtcttatatacttatgatacggtcggaaggcttagcagtgtgtctgggaaaagagccattcgcggcaatgagaaagagattaaaggtgtttatacatatgaaaaagaccgtttaacaaaactcactcataacggttgtgagtatagttttacttatgatggttttggcaatggcacaggtgtgtctattgcaggaacaaaggtgattggccatacatatggggcaaagaatggtactctctcaaagagcacctatgccaacggctgggaagtcacatacacctatgataaccttgaccgtgtgacagaggtgaaagcatcaaaagacggcacaagttataccattggccggtatatctatgacaaacttggaagggtggcccgttttgtggacggacaggtatccgaaaaatcctgtacttacggctatgacctgacagacagattgtgtgaagcaatctttgatgacggtacagcttacagatatacctatgatgccaatgactgcctggtaaaggaagtccagacgacgccggctggtgtaagaaccgttacaagaggctatgatgcggacagccgtgaaacctctgtaatctgtggcagtgcaaagattgaaaagacctttgacaagctgggaagactttcatctattaagagaaacagcggaaagcatacgactgtttttcaatatatgaaagcgccggacggtggagaaaccggacgagttgcatctatcaaaaatagcagtgatgcaatttcatatggttatgataagcgtggttatgtgacatcagcaacaaatggaagtacagcctggaaatatcattatgatgccagtggtcagttgatccgggaagaaaatccggtacagcagaagacttttgtctatcagtatgatgagggcggcaatctgttggaggtcaaaagctatccgatgacagatagtgcagaaccggaaggaagtggcacggttgagaaagcatttacctatggaagtacatggaaagaccagctggcagctgttacaatggatggaaagaccagaacctttacctatgatgccaacggtaatatgctcagtgacggaaagtatacatatagttggacaaagggaagcctgcttgaaaaagtaacaggtgatggcctggaggccgtctatacttatgatgcatcaggcatccgaacttccaagaaggtgaacggcactacaacagaatacctgacagcaggaggcagtgtcctgggagaaaagaagaacggtgtatggcagtattacctttatgatggggatggacagctttctgcaatttcgtataagggaggtgattattactacatcagggataatctaagaaccattacaggacttgttgacgccaacggtgcggctgtagtaaactacaagtatgacagctggggccgaatgcttgatattacaggcagcatggcagagtcgctgggtaaggataatccatatcgttataaaggctactgctatgatgaagaaaccggcatgtattacctgaagagccgttattatgcacctgaaatttgcaggtttatcagtgcagacgatatatctgctatgttggattcgccgatgtctttgtgggataagaatctgtatgtatactgtgataatgacccggtaaacaaaaaagatgatgatggtgagattgcggattttgtagcaatgggtattattggcgcagtggccaatgtaggtatttcttttattacagcaaagatgctagggcaggattatggatggcagaatgtattggaagactcaataagcggggcgttgtgtgcaattccggcaatatcaatgatatcaaacagtgaaaaatatttaaaaagagctggtcaaataattatggtaggaaaggctgcatggttagctatttcaggctatttaaagggatattcattaaagaagacagcattatatatgggagtaaacttatggttggaaacacctaattttagtgggatagttgatccaaaaattccagaagaactgataaaacaaatagggcgaaatttagtttatgagttgggtttttcttctcttagaatgggggtaaatactggatttgatatagcatctggaaacaataattccaagaaaaagggaaatcaatccaataagaaaaataaatcgtcaaacaaatggacgcctccagctaattctggttataaaaataaaaatggtgtagtactgataccaagcccaatagattatattattaatatgtcacagttaaaaagataaatctatcctagatgattattttaaagtgccgagaattatggcaatataaatataccataattctcggtatcaaataagtgaagaagttgaaaggaaactataatgattattagacctaagagatatgctggattgtttatggctcttatcatagagtttattatgattccgttttatatttatgcagcttcattaaaaatgtttttagttgaaatggggattgtgcaaattcttgttttgggagtggttttaagcattggaaaaacaatcattttgaatgaaaaaggatgctgtttatcatggttgaatgggttaattaggaaagaatatgattgggaacagttaaaaacaaagcgtgtgttatataaaacagatcgtagagaatcatatgggtttgaagcagaaaaatgtgtgttgttatcaacgcgtataataaaaaataagtctgtttggaacaatccttttgtacaatcagagaagtatacagaagtagaaaaaggtgccgattttgtagataatttaccatttatatttaagcccatcaatataatatacatttattttaatcctggaattggaaaatctgacaaggatggaagttgttatgaaatggtggatgagaaggtttttatggaaaaaatggcagaatggcatgtagaattggaggataataaacctgaggaaatacctccttggaaagaacaaatttagtatgtagacaaggactgcaatatcacaagacagggatcgtctgaccaagatcacccataacggctttgactatacctttgcctatgatggatttggcaacagaaagagcgtatccatcgccggaaaggcggcggtcagccatgattatgaggcaaagaacggcaatatcttaaagagcacctatgccaacggctgggaagtggcttacacttatgataaccttgaccgtgtgacagaagtgaaagcatcaaaagacggcacaagttatactattggccggtatatctatgacaaactgggaagagtggcccgttttgtggacggacaggtatccggaaaatccttcacttacggttatgacctgacagacaggctgtgtgaagcggtctttgatgacggtacagcctaccgatatacctatgatgccaatgactgcctgattaaggaagtccagacgacaccggatggcgtaaggactgtcacaagaggctatgatgcggacagccgtgagacagctgtggcctgcggcagtgccaggattgaaaagacctttgacaagctgggaagactttcatccatcaggagaaacagcgggaaacatacgacagcttatacctatgaaacagcagcggacggcggacagacaggacggataaagactgtgaaaaacggcagcggcacatgggagtatgcttatgatgcctggggcaatgtgtcgaaagccacagaaaacggcagtgcagacagccatacttatacctatgatgcccagggacagctgatccgtgaatatgacccggataagaagctgtatcacggctatcagtacgatgccggcggcaacctgacggaagtgcgcagttaccctgcaggggcagagggtggaccggacggaacagggacagtccttaagcgttttgcctatggcagcacatggaaagaccagctggcatcggttacaatggacgggaagacaagaaacttcacctatgatgccaacggcaacctgctcagtgacggaaagtatacctacagctggacaaaaggaagcctgcttgagaaagtgacaggtgatggcctggaggctgtctatacctatgacgcatcgggcatccggacatccaagaaggtgaacggcactacaacggaatacctgacagcgggcggcagtgtcctgtccgagaagaagaatggcgtatggcagcattacctgtatgacggcagcggccagctgatggccatccgttataagggcgcggattactattatatccgtgacggcctgatgacgatcacgggactggttgacgctaatggtgcgtctgtagtaaactatttttatgacagttggggtaatatgcttaatattacaggcagtatggcagcaagtcttggaagggataacccgtacagatttaaggggtactactatgatgaagagacggggatgtactatctgaagagccgttactatcagccggagatttgcaggtttatcagtgcggatgtgtatatcacgacagaactgaatacgaatggcagcaatatgtacagttactgtaagaataatcctgttatgttgatggattcagatggcagctttgccattctggcaatagccggtgctttttttgcaaaaaaaggaacagaaatgctggttggtgcagtggttaatgttgtaacgacaggtttagcagcaagcattgtaggcgaaaaatatacattaaaagatgcagcaatggctgcattaacaggagctgcgggggctttaggagctgctggatctttggcagcaggattaataagcggttttgttgcatatgggagttctagagagcaaggagaagataaaactgtatcctttacaaatgcggtaatggcaggcgcttttacagtaggaagtacaggaagtttatcaacatttttgacaggtagttctttaataaaaacagccacagaggtagaaattaaactaggggcttctgcagcaataggtgcaacctgtgattttgggtataatcttatgtcagcagcggcaagtaaagcttataatagttcggtccatgcttcgaaaaagaataaggttaatattcaagcttgtgcgatagcttctgtaatacagattgcagtatataaagcaaaatctatgaaaaagaagcagaacaataggaggaaaaaaggatggatagatctggagggtattcggaagaggagaacgtacaattaaaaatatatagtgatcaggatacacatggaatggctgcatgggttataatctttgctttggttttttgcggattgatgtattatgacagcggcgtaacaaggtgggaattgattgagcgtgttgtgctagggggagtacctattatatctttgacgataacactagctatgtatgttgcgttgattgaatattcagagaaaaggcggcgttttgtttatgtgcgtatatatagcggaacattgcatttgagggatgttattaaaatatctgaaaaagagaaaataaaaatcacagagatgtgtgttccgacaaacggtgaattatgttcatccgatacagcctgctctggtgatattgtaattttaccaaatgatgttttgcagctaaacagtattttggggaacgaaatgctgttgccgcagagaacatttattgaaaatcctctccctatgctccaaacaacgattgcagcaaagaaatctgaacagcgggaaatattgcttggggcacttacagaaatttcagatggcgaccctcttttaaaatattatgtggatactacaacgcatgagattatactttcttttttggggaaagtgcagatggaagtcatttgtgccatccttgaggaaaaatatcatgtggaggcagaaataaaagagcctactgttatatatatggaaagaccgcttagaaaagcagaatataccatccacatagaagtcccgccaaatcctttctgggcttctgtcgggttgtccatagagccgctccctattggaagtggagtgcagtatgaaagcagagtttcacttggatatttaaaccaatcgttccaaaatgcggttatggagggggttctttatggctgcgagcaggggctgtatggatggaaagtgacagactgacattactgcccttccacccctgccctatctacctcgtcgtcttcaaggggtcttacttctttcgaatgagagatctcatcttgaggggggcttcacgcttagatgccttcagcgtttatcccgtccggacttggctactctgccgtgcacctggtggtgcaacagatacaccagtggtccgtccatcccggtcctctcgtactaaggacagctcctctcaaatctcttacgcccgcgccggatagggaccgaactgtctcacgacgttctgaacccagctcgcgtaccgctttaatgggcgaacagcccaacccttgggacctactccagccccaggatgcgatgagccgacatcgaggtgccaaaccactccgtcgatgtgaactcttgggagtgataagcctgttatccccagggtagcttttatccgttgagcgatggcaatcccactttataccaccggatcactaagtcctactttcgtacctgctccacccgtcggtgtcgcagtcaggctcccttctgcctttgcactctccgaatggtttccaaccattctgagggaacctttgagcgcctccgataccctttcggaggcgaccgccccagtcaaactccccgcctgacattgtccgcctgccggttcacggcagctcgttagaaacctggcatcacaagggtggtatcccaacagcggctcctcgccttttttgaggaaaatcccttgccgatttcagggatttttaacgcttttttctggtaattttagtgtatcataaacaatgatgaagagacggggatgtactatctgaagagccgatactatcagccagagatctgcaggtttatcagtgcggatagttatgatgtattgacacagtctcctatggcattagttgatacaaatttatataattattgtgataataatcctgtttatagggaagatgagaatggtcagttttggaatgtagtaattccggcactgataggtgcggctgtaggtacatttttgacgtgggcagcaacatctgcaacaggtcaggaatatacaacaaaagattatctgagtgattttgcagacgaattatgataaagttgctaataatgtgatggatgtagttgaaaatgcgggaagagaatttgtaggtgctattacaagtagaatttttaattcagacccttcaaaaactaaatcgtcaaaatcggtaaaaaatagttttaaacgtactttaatttctaatcggattataaggaaagggaaaaaagtatatagaaagagagtgtattattatcgaggacgaaaagaatggagaatagaaaggatacattaaaacgtggatgaggataaaattataattatacctgaaaaatattatatgcaaatctatcaagtgggtttttggtttcttataattatgtctattatatgtatagcgtatggtttttttgcaaatgaaaaagcatggttaacgtatactataatagggaatgttgtaggagaagtaatattgattcgagaatggtttagctttggcagagtgatagagatggataaagaaggctgtaccgtcaaatggcgaaaccgcagtaaggaatatcgctggagtgaattaaaaacaagaaggatagagaataatataaaatcatgttatacagattgtcgcaaatgtgcagtgatttctccgtatgaaataaaaaggtttcgaaagaaagagccaatgagctattttataaatattttacattggagagattggagtactttttatgtatatttagatagtggaaaaataaatgatggaaagaatagttatgaaggcggaattaacgaaagtatattcagaggaaaaattgctcaatggggagtaacatttgatgatgttaacttgaaaaaagttaaaccatgggaagaaatattataaccattccattttgttctcaatgccccgcattcttgcggggcatccgcagtacggaaacctctgggtacggcatataaagcccttgtcatggcaccgaagggcaccagtgtcacgatctgttgtggtcaatcttttttgtaacactaagggctaaaaaatcctattatgacgatgcccctttttcaaatggcatcatgctgtttttcgtgcttcaaagggggttttatagttattgtaagaatgaggtcttctatgattgtacgttgtgtaagtaaattcttctattgctgtatacaaagcttcttctgtctggtattcatgctgatagatcaattcattttttatattgtaaaagtattgaaatttgtcaacgattagttttgatagtggtcacagtagttctcagacaattgctcagtacggaaattcttcaaagccttttgttttttatgctgagacagacatatcatctccgctttcttcgtcattagtagggttgttgataaacagaggagatagtacgaaaaaaatcaatttagcagttgataatattggtgtggaggttagttatacatcaaataatattgcacagagtagtagtaagtattttgatttgacagatatgaaacttcattacaaaacatctgttatgaatcaattagacgatatggaagaaagcgaatatacagatataggaataggtggattgttcattgtaggagctttggcttacgttgccggaggaataggaacaattgctttaccagtggtgtagcttttgagatgataattatgaaattattagtaaagacaacgggtatgggagtacttcttatactcgattgtctaaaataaataaggaaaagggagatatgaatgattgcggttagggttattattgaagttataattttcatctatatgatgggattgagtattgggctaagaaaacagaagataaaaaagactcaacgaattaagatgataagaatttttttgacgattatgtttttggtagttgttccctattctgcatgtattccagtggaaaatttttttattacatttaaaacaccggaacaagcattcaaatgtgaaaattggttaatgcctaaaggtgaaatacaagacatcatatatggggaagattcctgttttgtaataataaagaaaaaagagaaaaaggctgtgtaagttttgattcggaatgttataagaaagtttcaaacggatataagtttgttggttcctttgatgtgggggcagaaaatatttctggtatgggagatatattgtggcatgtaaatgggacaaaggattactatttgtctggagacaagtggtctgataatgcagaagatacaatagaagtcagcgataatctgggaacgcagtttattcaagagagaggaaaaatagatgagtatagggatgtaaaaatatatacgcatgaatattatggatatgtgtatgatatgactgagcaatatgaaatatatgttgatggaaagaactataaaccgacattcgaatataaatattcttttccttgattttgattgccaacggctgggaaggcacaaacacctatgataaccttgaccgtgtgacagaagtgaaagcatcaaaagacagcacaagctataccatcggacggtatatatctatgacaaactgggaagggtggcacgttttgtggacggacaggtattcggaaaatcctgtacatacggctatgacctgacagacaggctgtgtgaagcggtctttgatggcggtacagcctaccgatatacctatgatgccaatgactgcttggtaaaagaagtccagacgacaccggatggcgtaaggactgtcacaagaggttatgatgcggacagccgtgaaacatccgtggcctgcggcagtgtcaggattgaaaagacctttgacaagctgggcagactttcatccatcaggagaaacggcgggaaacatacgacaacgtatatctatgaaacagcagcggacggcggacagacagggcgtataaagaccgtgaaaaacggcagcggaataggcatggtaattggtgcggccagctctgcgataacacagtatatgttcaatggagaaatcaattggaaatctgtgggggttgcagcagtaggcggtttcgtcagtggcgcagtggcagcaagcccgttaggtttgacggggcagattggagttggagcagcagttggagcagtatcgtatgttgcagattgtaaggtgaatggcagtgctttaaaagtggacgaactggcagtttcagcggcggctggtgcagtttcaggagggattggcggatcaggagcaaatcagtacaaagcattgtctaacacgataaagactgcttcaaagacgacagcgcgatttacaagactgataagcacgaaaggaagtgctagtcttgcagctaaaagaattgcggaagcaaaaatgtggagagataccgtgttgaaaggaacaacctggattagcagtataaaatttgctgctggaacgggaacttccaatgtgattgctcagctatggacaaaagcaaagaataaagtaagaagctggttcaaataaggtatgttttttggacatatgaaaaagtagaaaatgtcacctatgttgaaatgaaataaaagagacataggtgacgtagagtagatgtattgggtagataaagtagagacaataaggagtagaaatgataaaagcaatggcacgagttattctttggtttgcaatattatcttttatgggatggtatgcaaattcattatccattaggcggataataaaaaaagtaggcattcggataaaattttatccggctcattatatcatgccaagcagaaagatgaggaagatatttaagctggataaaaaagaaataccgaagtggacatatctatcactgtatttatcatttgtttatattatattgtttcttgtttttttgattttatttttacttttagatgctaaagtgatggttatggatgtgtttcacacggtatatattatattcatgtggatggatgtgatatattctacgattttcatctttttgtataatgtttgattgaagttgatgtgttacaaaagcaagggatttaattttaaacgctgcttaataaggaggaaaaatggaacgatacaaaataattcttttctttgcaatcttgtcttttgctggttgggatttgaattcattatccattaggggataataaaaagagtaggtattcggataaaattttatccggctcattatatcatgccaagcagaaagatgaggaagatatttaagctggataaaaaagaaataccgaagtggatgtattttttactttatctatcatttgtttatattatattgtttctcatttttgtgttatatgttctgatagatgatgaattaacaatattacaagtatttctgtatggatatggaatcttaatagttgcaaatatcatatatttggcgatttttgctttcctgtataaaatctgattcttgtaattacgtttatagatgaacagtagcgggctgttggaagttggataatgtcggataaatagctggatacagacggatggcaggtagtctggcagcaagtcttggtaaggacaacccgtacagatttaagaggtactactatgatgaagagacggggatgtactatctgaagagccgttattatcagccggagatctgcagatttgtcagtgcggatgtgtatatcacaacagaattgaacatgaatggcagcaatatgtacagtaggaagtacaggaagtttatcaacatttttgacaggcagttctttaataaaaacagccacaaaggtagaaattaaactaggggcttctgcagcaatcggtgcaacatgtgattttgggtataatcttatgtcagcagcggcaagtaaagcctataatggttcgattcatgcttcgaaaaaaaataaggttaatattcaagcttgtgcgatagcttctgtaatacagattgcagtatgtaaggcaaaatctatgaaaaagaagcagaacaataggaggaaaaaaggatggatagatctggagggtattcggaagaggagaacgtacaattaaaaatatatagtgatcaggatacacatggaatggctgcatgggttataatctttgctttggttttttgcggattgatgtattatgatagcggcgaaacaagatgggaattgattgagcgtgttgtgctagggggagtacctattatatctttgacgataacactagctatgtatgttgcgttaccatatctgcttcatagttggtttcttttttgttttctccaaatacattgtccagtcaataattcctttctcaggctgtagttcttctaaatccgcatcaattccacctggataaaaattaacataaaatgcactccaaggtcttctccagcaacagtacgtcttaggctgcatccattttggcttttttacctttttcaatgaaaagaaaatcccttcctcatatccccgcttcatgcctcttggcgtactatacatcatatctttgtagttttcataccttttcacactcaattcattccatttatagaattgatgtattttccaaaaactcaccctgcatccttctttgctcatcaccagttctctacaaaacgcaacatacatagctagtgttatcgtcaaagatataataggtactccccctagcacaacacgctcaatcaattcccatgtgcgtgcacaccggggttacggactgtcaaaagtgagctgaaagttagccgaacggttttgggaaagccggccagagagggtgaaagccccttaggcgaaaacggaaggcagcggacaggatccagagtaccacgagacacgagaaaccttgtgggaagtcggagggaccaccctccaaggctaaatactactcagtgaccgatagcgcatagtactgtgaaggaaaggtgaaaaggaccccgggaggggagtgaaagagcacctgaaaccctgtgtctgcaagctgtgggaggacgttaaggtccgaccgcgtactttttgtagaacggtccggcgagctgccacatccggcgaggttaagcacttaaggtgcggagccggagggaaaccgagtcttaacagggcgttaagtcggatggggcaggcccgaaaccgggtgatctatccatgtccaggatgaagctgtcgtaaaagacaatggaggtccgaacacacatccgttgaaaagggtggtgatgaggtgtggataggggagaaattccaatcgaacccggagatagctggttctcctcgaaatagctttagggctagcctcttaaaagagtaacggaggtagagcactgaatagcctagggggcgtcaaagcctaccgaagcttatcaaactccgaatgccgtatacttgatttaagggagtcagactgcacgagataagttgggcagtcaaaagggaaagagcccagaccgccagctaaggccccaaaatgcatgttaagtggaaaaggatgtgggatctcaaagacaactaggatgttggctcagaagcagccattcattcaaagagtgcgtaatagctcactagtcgagaggtcctgcgccgaaaatgtccggggctgaaacatgctgccgaagctgcggaaccgcaaggttggtagaggagcattgaatgcgggaagaagctgtaccgaaaggagcagtggactgcattgaagagagaatgccggaatgagtagcgagaaataggtgagaatcctattggccgaatatccaaggattccagggtaaagctgatctgccctgggtaagtcggggcctaaggcgaggtcggaagacgtagccgatggacaacaggtggagattcctgtactgcatatggtcagaactgtggggacacggggtgttaacggaagccgggaaaggaaagaccggtccaagcacaggaggcgttgcgcaggcaaatccgcgcaataagccaaaggtgtgacggggagcgaaattatagtagcgaagtccggatacatgctgtcaagaaaagccgctattgcgccatatgtacccgtaccgtaaaccgacacaggtggatgaggagagaatcctaaggccggcgggagaagtgttgttaaggaactcggcaaaatggccccgtaacttcgggagaaggggcgcccagaaatgggccgcagagaaaaggctcaagcaactgtttagcaaaaacacaggtctatgcgaaaccgaaaggtgaggtatatgggctgacgcctgcccggtgctggaaggttaaggggagaggttagccgcaaggcgaagctttgaacttaagccccagtaaacggcggccgtaactataacggtcctaaggtagcgaaattccttgtcgggtaagttccgacccgcacgaaaggcgtaatgatttgagcactgtctcgacaacacacccggtgaaattgaaataccagtgaagatgctggttacctgcgccaggacggaaagaccccatggagctttactctagtttgatactgggacccggtatgacatgtacaggataggtgggaggcgaccaccagagatgagatcgaagagttaattgccggccatgcagtcaagaagcggattcgaatggatctgacctatgatgaggttgataatacgattgacaatgtgtggagtgttttgtttacaactggttatctgacccgggaaggccgtgagatggatggtatctacaggttgatcatcccgaataaagaagtgcgggaagtctttgtgcttcagatcagggaatggtttaaccgtgttgttgcaaatgacagagcatccacggagaagatcaatcgaggattccttgaaggagaatacaggaacgatttaacttatttcacaaatgggcagggagtctgcttgacagagttaaaaggataccagccagctattggtaaatttatttgccaaccccgccgcccgaatagccgtatagataaggttcggcatatgttccacaagttagcttaacagcttgcaaaagtcatataaaatgagatttgaaaggattagagactaattatgatgaaatgcgaatggatattgtgtcctgtttgtgggagcaaaacccgtaataaaattaggaaggacactgttttggagaattatcccctttattgtccaaaatgcagacaagaaagattgattaaagttgacaacttgaagataactgtcatcaaagagccagacgcttaagacgcagagccgatgaaattgtggaacaattcacgaatcatcggctctttttgtttcgtatttgaaagaacaaactcaccaaataaaaaaaacgatattcgggtgggttattttgttataccctaaattaccctctgaatttgtttttaaatttggagggatttttttatgtccttttttcgggcagttacaggaaaagggaaaatagcagtaaagccggataaaatccggttatatgtcaacaaggaagaactttgcaaagaatatgaagatactctccgaaggtcaacagaagatacagagcttctcaaggatttgtttgagaaacttggttttcagagaaaagaccttaaaacagtatattttaatgtcgatacagaatatgaaagctatcaggacagagataagagctggaagcgaagatttaaaggttataagtataatcaccatatgaaaatagagtttgcagctgataataaaagattagggcaagtcctttacgctttggctcatagctcattaaggccagagttttctattgagtatacagtggcagatgtagaaaaatgtaaaaatgagctgttacataaagcaatcgaggattccattcaaaaggcacaggtgcttacaacagcagcaaatgtgaaattgggtgaaatacaggcaattgattattcttggggagagatagattttgtaacaaagccattgaatgaaatgagattaatggagtgtacggaatgtgaaatgagtgcaccgggagcatatgatatagatattgaggcagacgatattaatgttactgatacggcaactgtaatatgggaaattgcataaagaggaagatataaatagattagacgaaaagcaagaggcaccgttaaagtaggtacctccttctttttagagagttagctctttttctgatatgggaatttgcatctccggagcattaagtagtgctgtgaaattctgtctaatgatattcagtgtcttctgctttttctgcaattcttgtttttcccggacagtagcagcttgttcagattcaagattttctatcctattctggattttattagagcttgggattttggtaacaccgagatcctgaagctctttttttagtgaatcgtgcagttggtattctgcttgatgtttggttcggtatgcttttggatttttagcagatttgcaatcttcaatcacttttcggcagagacggtaagaatcacagtgtttttgaatgattttctgtgtgctcagctcactgttgatttgcgttattctttgatcagccgctttaacagaagcatcaacatcagaaacatgctgttggaaatcttcataattcagtaggttattttcggaaagatagttgaaggtgcgtgccgcttctttcaggttatttagttttgcccatcgttcaaatccttctcgattgccggtcgtaacataagtggagatattgatatacaggcgagcttctctggacagatgccttggagcttttattttgttacggttttttgccaaacggatgcggacattttcttctgaataatagcttccaagagatttcatataagtgaagtttttctgttccggtgcacggaaggacaggtgttttccctgtcggacttcatatccggctaactgcattttttgtaaaaattcctcatagttgatggaagtccagattgctttatcaactgcaacacgtagcttggctttccagctggtgccacgatgatattccatgttctccttataacttttgccttcttctccggttggcatactggtggcaagtccattttcatggcagatacgattactgatccggcagattttatggtagctccgcttattggaaacatacttgtgatgatcaacaaaacttgctgcattaaagatgatgtggttatggatatgatttttatcaacatgggtgcttatcacatattcatattttcctttcagtacttcgtttgcaaattgttgccctaagcgatgggcagtttcggcatcaacttctccaggtttaaatgactggatcagatgaaatgccaggttatcacctttgtccattccattcttttttgccatttctcttgtcatagaaaattcaagatctgcagtttccggggaacagccaaaactggaaactaacagtttttcttctgttttatctggattcgtgatgtagtccagagctttcttgtctgttactttaattgggaagatcttaagatacgccataattctttcaccatctcttttaattcttgcttttcttccggatacagatcaccggtgctgtttacttttttggcaatctgattaatattcacaccgatcttatgcatttcctcatactgtttcttcagtggagtggtatcggtgttgacgatgtaaccgtcgattgccattttacgaagataagctcccatattttttgtctttgattcaatcatctttctacgaataagctttttttcttctggggaaacacaaaacaaaatctgtatatttctttttctctttgccataggcagattctcctttctttggttcttcgaagtagtgacttctgtgtttttaatttagggcagggttccctaaattgctggttttccggaagtgtatatacacttcctgtccttgctatttaccggtggcacagccgccggaagagagtcttaaaaaagaaccctctataaataaggtactgagagaagaaaaagaggacatcgaagctcagaagtatgacgcaagcatgattctgtggtatagtaaaatctgaatgaaaaagaagaaaagaggtcaaaccgatgtcacggaaaaaccataagatgatagatgggagattactgcaaacgaataagaagtattcccagttaaaaatgaagcagaaagaaaagattgcggaatggatgtttcaggcaaccagagattattatatgaaaaaatgtacttttccgagtgacaaacatctggaagaagtggtggattctgtttatgaaaaaattgaagatgcagaaatctggattccgtatggagaggtcttcaagcattataaatccaaacgatcggatatcaacaaacgtgtcagaaaatctctgaatgaaaaagaagagagtcagattgagaaggtctgttttatgaatatgtgtatgattcaggatcataaagggaatgtactggctctggataaagtaaatgatagctataccggtacaacttttccaggcggtcacgtagaagcaaatgagatttttcagaaatctatgattcgggaagtctgggaagaaacaggacttacggttgaagcaccgaagcttggaggattatatcattggcataagagcggagtgcactatgttattaccttgtataaagcggataagtttaccggagaattaaagagttctgaggaaggaagagtttattggattccgctggaagagttaaaaacaaaagaacttgctacaggtatggaacacgttttgcggattctggaatcagagaaggtggacgagtgctatatgcatctggaagcagatggatatgtgggagacttgtattaaagaattacatgagaaatggctgcctgctcattggagaaaagacagccattctttataagatacatcattcatctattctgttttttgcggttcgtttttggaagtgaaattaatatatttggcacgttgtaaaattgaaataactgcatcaatgctttcaggattggagaagctcatgataaaaggttcttctttaaattccatgggttcgaacccaggattctgatctggattcttgagtatatggatgggacgtgcactctgattataaaatgccagttgtgcggaatctgtagtgttaccgatgacaccaatgcctacatccccttttccaaagtctattctatgtttatttaagttgatcattttcaaaaatctcctttttcaaaaatagcatatttagtaattttctattattcccgaagtagggatatcttttaaaaagtcactgttggaagtaatcggagaatctacaatctgaacgccgcttcgtttcatcattcggaatttgaaatcaagaagttccggtggaactttcagttctgcggcagcctggaaaaaggacatatcggcgttaagcatctccagtacatcttcatcttccagaagataatcagcggcaaagcaattcgcttcatattcacattgtgatactccatcgaataattcaaaatcatgaaaacacttgatctgaagggttttctgatgaaggagtgcgtgaccgatctcgtggatcaggataatctgctgtatgatttccggcaggtcgcagttaatgacgatgcaggtctttcgacattcccgcatacagaagcctttgcaacagtttggatcagttccaagcggaagcttcttaacaataatatgcatagcggctgcaaggcggtacggatcactttcctgatattttgtttttactttactaacagtgtctcttatacattttgaactcataaaaacacctcgatatttcataagatagtttgctgcaagtatagagtagcaaaagtgctgtacgaaaatacggacacctatgaatccctttccgtttcagtgtttttctttttccgtccaaatgtctttttagcttccatcttacaggaaagatatgctttggttacagcctgatagaaagcatcttttgcttcttcatcgagttcgccaccagcaaaaagagcacggttggcttcgagaatctcattgatgtccctggcacctttttcaccaagctgtccattgacttcatcaatataatccattttttcaattccataagaaggatctgtgatctcatcatgttttaaataatcataagagacatttaatgcatgagcgagctttctcatagtagagattcgtgcgattgtgccggaactttcataagctgcgattgcacgctgggatacgccgaccagttctgcaagttctttctgtgtcagatgattttgttctcgttgaaatttaatcttgtctgaaaaattcatagtgggatcctttccaagtttttgaaatcgtaacttcatcaacttcataaaaactattgacagagttcattatcacgtatagaatacaaacaaacgttcgtgaagttagtagaaattataattcaaaaacttcacaaagtcaatatgaagcaaagaagttttattacgatttttagactggtaggtgaatgttatgagcaggacaattcttcattcagatatgaattgcttttacgcaagtgttgagatgctgcatcatccggaacttgccggaaagccgatggcagttgggggcgatccggaagcaagacatggaattgtgctgactgcgaattatattgcaaagcgagccggagtaaaaacaggtatggcattgtggcaggcaaggcaggtttgcccggaaataatttttgtaccgcctcgcatggatctttatttgaggttttccagaatggcacaggagatttacagtgaatacacagatcagagagaaccatttgggattgatgaaagctggctggatgtgaccgccagtacttctatcaagggagatggaatgaagattgcaaaagagatcagcagtcggattaaatatgaactgggtgttaccgtaagtattggtgtttcctggaataagatatttgcaaagctcggttctgattataaaaagccggatgccattacagagttttccaaagacaattacaaggatattgcatggaaacttccagtaggagatttactcatggttggaagaagcactgaacggacgatgaagaaacttggcatttgtacgattggcgatctggcaggggcagaaccttctatattagaaacatatcttggaaagatgggattggtacttcatacctttgcaaatggatgggataagactccagtttcagtagaaggatatagagcaccaatcaaatctatcgggaacagcacaacaacaccaagagatcttgttagtgaattggatgtgaagattattttgatggcgctttcagaaagtgtaggagccaggttgcgtgaaaatggttttcaatgcaggacagtagaaatctcgattcgggataatggactgtaccatttcacgagacagtgcaagttggacagggcaagtaatcttacagaagaaattgccagaactgcatttgagttatttcagaaaaattataactgggaacatccgattcgtagtcttggtgttcgaggatgtgatctggtgtctgaagagatgccttatcagcttgatttatttatggatgaaacaaaaagagaaaaaatcaaaaagatggaccaggtggcagatgagatccgtggaagatttggttatcagagtattcagagagcatttatgtatcaggataagatactggcacagctgaatgctaaggaacacacggttcatccacaagcatattttcatggataggagagagcaggtgttttgtaatgacagctaaagtgtatgtagatgtcctggcggtattcagccgggaaggagaattgatccctacagcgtttgtctgggaagatggacgtaagtatgcgattgataaggtttcaaaaccggagcgttgtgccagtcgaaaagctggcggaaccggatatcgttatacctgtcaggtgggcgggaaaatctgtcatctgacttatgaagaaaattataaatggtttatggaacgtaaataacggtgccctaaaagggagccctgaatcagggccccctttggagagatagatattcgatgagaacatcagcagtcggggatacatcctttcccgtgagaaccgattgctttcaatagatcatacagttgccggtcagccagaaatagaagctatcccacagcagatatttctgcggaatctgcatgaagagatgttaggacagtgacagactgtgaatggaataaacaatacaatgattggtctggctgcggaagcggtcgggaaggaggacaattatgcagagaatacaggatatgtttatcaatatggaagaagtggcagaggatgcttataagaatacggaattattgttgagtcagtataccaaggtaatgttccgtattgagaagaatcttgtggatatagattatgaaatgtatgcagaagaagggaagcatctgaaggaaatgttatatgatctggtagatttcgatgcgactgcagagaaacgcagaatccaggaaaagcttctaaataatgatatgaatctctgtttgctggaaatcatgagagattccctgatagctttgagggattatccgaagaatggacagctgtattatcggcttttgaaatatagatattttgaagcaggaaataccaatgaagatgtgatgctgatgctggatgatatgccaagtaccacttattatcgaaaccgtaagaaagcaatccgtttgtatgcaacaatgctctgggcatttacacgtccggaaaagatacagaataagatggaggaaataaactggaagaaaagtgggagtaaagtggcagtgaactgacagtaaactggcatgtgaatggcattacaatgaaaatacatgcatgttagaattgatatgctgagagaaatagaccttcgcagacgtaatgtttgcggaggtttttcttttctcaaattttaaggcgtcaggctgtgcccggaagggcatggcctttttttatacccaaaaaacaggttgcagatttgaaaaagcttcctttttaacaggtagatgccggaaaggaagagcatatcaagatgcagggaagaggcagacattatgccagatatccatgatttccgatttgtcacaaatcaacaaaaacgacaaatcggaggaacaatcatggaagaaagaaaatacacattttacgacagatatcagaaggtgaaatacgctaatattacagcagaagagctggaagttcttaatatttcttataataaggaacattatatgttcgatcagcagcatcagagaaataatacagtattattttgtggattagaatcagaaaacagttgtgcgacagactttatcgcagatgatggacgtgacattgcatcagatatcacaacagagatcttcttcaaagaactcttcagtgatctgacagagaaggaaaagaaaatcgtgagcgattattttattatgggaaaacaagttaaggaaacagcagcggaactgggcatcagcacacgtcaggtgagtagagacaagaacagtgctttggcaaaaatgttaaagagaatgaaagcagctggatatgaatcatatgctgaggcggcaggtgcatttctgcaggaaagcgattatattccaacacagatggagacgcagaattctattatgaagaaaaggaccggagaagtgagactgccatcagatcataagatgaaaaaataaattcttaaaaaacaaatcatgataataatgtgatgatatcacagaaaacaaataaaattcagattataataaagccataaaagaaaaaacgaggaggactgtaaaatgtctgctattaatatcaataaaaataattttcagaatgaaataatggattccgagaaaaccgttcttttagacttttgggctccttggtgtgctccttgccgcatggtagtacctattgtagaggagattgcaagtgagcgtagagatattaaagttggaaagattaatgtagatgaagagcctgaactggcaaataagttcagtattatgagcattccgactttagtggttatgaagaatgggaagattgtacagcaggtttcaggggcgagacctaagaatgcgattttagaaatgctttaaggaggtgcgctaatgggcttttttgatttctttaaacaggcgaatattaatcaaggaatagaggaatataaaaggactgccggtgcagttctgctggatgtacgtactccgcaggaatatcaggaagggcatataccagaaagtaaaaatgtgccgttacaacaacttaacaatattgtttcagtagtgaagaatacagaaataccgctgtttgtatactgttattccggagcccgaagtcgtcaagcaactgggatgttgcaacgaatgggatattctaaagtaaataatattggtggcattgctgcttattcaggaaaggtggaaaaataagatgaaggtaataatcgtaggcggtgtagccggaggagctacagctgcagcaagaatacgaagattggatgaacatgcagaaattactgtgtttgaaagatctggatacatatcctatgcgaattgtgggcttccatattatattggagacgtgatcacagacccggaagaacttacactacagacaccagagagtttttttaaacgcttccgtattaacatgaaaattcatcatgaagttatttccatacatccggaacgtaaaacggtttcagtgaaaaatttagagaatgatgagatatttgaagaaaactatgataagctgatcctctctccgggggcaaagccaacacagccaagacttcccggagtaggtattgataaactttttacacttcgtactgtagaagacacttttcggataaaggaatatataaataagaatcatccaaaatcggctgtattggcaggtggcggttttattggtctggaactggcagaaaatttgagggagcttggcatggatgttacgattgtccagcggcctaagcagctgatgaacccttttgacccggatatggcatccatgatccataatgaaatgagaaagtatgggataaaactggtactgggctatacagtagaaggatttaaagaaaaagacaacggagtggaggttctgttgaaagataatccatcccttcaggctgatatggtggtgctggcaatcggagttacaccagacacagcattagcaaaagaagctggtctggaacttggcatcaagggaagtattgtagtgaatgacagaatggaaacttctgtaccggatatttatgcagcaggtgatgccgttcaggtaaaacattatgttacgggtgatgatgcgctgatctctttggccggaccagccaataaacagggaaggatcattgctgataatatttgcggcggtgatagccgttatctgggcagtcagggaagctccgttatcaaagtatttgatataacagcagccactacaggtatcaatgaaacaaatgctaaaaagtcaggattagaggtagatacagtaattctttctcctatgagtcatgccggttactatccaggtggaaaagtgatgaccatgaaggtggtttttgaaaaggatacgtatcgcttgcttggtgctcagattataggatatgaaggcgttgataaacgtatcgatgtgcttgcaacagcaatccatgcagggctgaaggcaactcagctgaaagatctggatcttgcatatgcaccgccatactcctctgccaaggatcctgtaaatatggcaggattcatgatagacaatatagcaaaaggtaccttaaaacaatggcatctggaagatatggataagatttctaaagataaaagtgttgtattgctggatgtgagaactgtaggtgaatttaacagggggcatatggatggattcaaaaatattcctgtagatgaactgagggaacgcatcaatgaaattgagaaaggaaagcctgtttatctgatatgccagagtgggctgcgaagttatattgccagtcgtattctggaaggaaatggatatgaaacatacaacttctccggcggattccgcttctatgatgtagtggttaatgaccgtgtactgatcgaaaggtcatatgtatgtggtatggattattagaaataaacaaaatattttacgattttcacgtagtataaaaggattcccccatttattagaatgactttcataattctgataaatggaggattctttagatgttatagaaaaacaggtttatgatctttgtagtgtttccagttttttcgaatcaaggatggtgattttgccgcgtgagagtttgacgagaccttcgccttgaaagtatcgaagcattcgagtgataacttccctgtgggaaccaagatggttggcgatagtttcgtgagtaatttttaattcatttgtttcttcgatagaggtctcttctaaaagaaatgaagcaactcgcttatccaaactcttccacatgatctgttcaatcagccacatgacatcagaaaaacgggtagccattaactcattggtatagtttgcgacgggagccgattccttcatgatgtccttatagatttcagcagggatgatccaaagatcagtatctttttctgcttcaatggttacttcaaattgaatggactgcatgatacatgaggcggataaaagacacatatccatatcgaacaaacggtaaagtgtaatttcccgtccttcatctgaaagtatgtaagttcgaagctgcccggatttaaccagtaataatccagtacaatccaggtttccgttgtgaatgatcgttcctttttttacatcccgtgtaatcaaattgtctgaaattacttttttctgtactgtatttaagtcattccatagtggaaaataattttcgaagctcataacagttatctcctttacgaacatagtatacttacttttttaagatgcgtcaattacataattgacatatgccataaataaaaatatactgactatagtacatgactgttgtgaatatgagggagggataaataatgcagggagatgtcagttttacatttttggaccgaatcgaagaagtagaactgaatattgtagatagacgatggcagtctgcactggcattggcattgactttgccagatatttgcggaggtattgctttcccggaaattgttaaacattatcgagatggccgggttatgctggatcggaaaaagaatccgacccgtgatgtgggaacccagtatattcgctggtttgatgaatatgcaggggactactttaaactatctcaattcgatgaaaagccatatatttgcggagaacgctgttggcagcttcgatgtgaatatcttcatcaaaataaaggatttttgaatgatgaaaataatatacgctttcatcttggactaaactgtggaatgtcagtttgtcagttggacagtatgaacatacaggagaacggaaacgatattcgtatagacatagaacagttttgtctgaggatgtgcaaggcagcaaagagttattatgataaagttcatttggaaaaagactttagtctctataatacaccagttttggattttattcaggtaacacaaaaaaagaaagctgcttctattattgcgctggtctgtggcagtgaacgttatgcaaaaggattaaaagaagcattgcagtttatttcagagcagatcatgctgttttatacaccggaaagcgctaaaacaaaattagacagacataagccggatctttggattgttaccgaagatatgacgagccaaccgaatcagccatggcgtgcggacaggacaacacctgtaattttaatcacaggcaatcctgatgctgttgaaattaaaaagaattcaggaaaactaactgttctttctatgccattatcaatagttgatttgcggaaaaccgtcgaaatatatgtgtcgtgaggagaagtttatgctgtacataatactattatttgtaattgtatatttgatgatgcttatgcggagacagaaagaaaagatgagtgaaattaaaatacaaatagatcaactgcaagcacaacatgatcgattgcagaaagaaagggatcagttacaagaacggatgaatcatctggaagagcaacgagaacacttgcaaatgcaaacagaccaggcatttcggagtgctgatgaaatcgagaaaatttgcgatgagatatggcatcatgctaataccattcacctttactcttcgttagctgaagaagaaagcaaatctataacaatgaaagaaaaacaaaaagaaattattcgaacaactgaggaaattctaaacatcatatataaatataaaggtaatgtataataaaaatatgtcattgtaatgattagcgttcaaggtaaattcttatgtaataatatcacagaaggatttacctttttcaggtacaatagagatacaaaatttgaaaggggaacaaagcattggcaaaaagagtggcaagtgtcgataaaaaaagatgtgttgcctgcggagtatgtgaaaatacttgtccgctggcagcggccaaggtttaccatggatgttatgctgtggtagaagaaacagtgtgtgtaggatgtggaaaatgtgcaaagtcctgtccggcaggttgtattgaaatgaaagagaggacagcgatgtgaagaaaaagaaacattggtatgattatttatggatatgggcaatcctttattttgctctcggtttttttagtattttgttcgcttggtttgggatgattgatttcctgttgccgttaggaatagcaatattcggtggaaataaatttttctgtaatcatttgtgtggacgtggccagctttttagtaagcttggtggagatttaaaatgctcaagaaataaaccaaccccgcgatggatgagttcaaaatggttccgatacggctttttgatatttttccttacaatgtttggaaatatggtatttcagacatatttagttggtgccggagcatcatccttgcgtgaaatcatcaaattattctggaccttccgtgttccgtggggatggacatacactgccggaacagtagctgattgggtggcacagtttagttttggactttatagtttgatgcttacatctttgttgttagggttgatcgtaatggtgttatataagccacgaacctggtgtacattttgtccaatgggaacaatgacgcagggtatctgtaaattaaaaaataatgaaaagaagtaatactataaggcgatttataaaaggcatatgtcaaaaacattattgacatatgccttttataggactattatataagaaaagcgagaaaggagcagtttatgccgagaccagtaaaatgcagaaaagtctgtcatttccccaatgttttagaatttcttccggcagacgatactgacaaaaaaacacccattgttctgacggtagatgagtacgagacaatccgtcttttggacaagaaaggttatagtcaggagcagtgtgcagtatctatgcagattgcaagaacaacagttcaacggatttacgagattgctaggaagaaaatagcagatgcactcattgatgggcatccgcttagaatcgagggcggggatttcagaatttgtgacggtcagagtagcgactgcagctttggaggatgttacaaacaggaaatttacaaaaaatatgcagcagaaaaaggagaaggtatcatgagaatagcagtaacatatgaaaatggacagattttccagcactttggacacacagagacatttaagatttacgatgtagaggaaggaaaagtagtacattcagaagtagtagatacgaatggaagcggacatggtgcgttggcaggagttcttaatgccttaaatgccgatgtcttgatctgcggcggaatcggaggaggtgcccagaccgcattagcggcagcaggcattaagctttttggcggagtttccggatatgcggatgaagcagtagaagcttttatcaatgaaacacttgagtataatccggatgtgaaatgttctcatcacgagcacaaccacggggaaggacatacatgtggcgagcatggatgtggaagccacagttgtcattaagaagtgagactgccatcagatcataagatgaaaaaataaaaggtattgatctataaagagggaacctgcatcatcaaatttgcttgagatgtcgggttctcttttcgtttgcataatgatatacttttattgtgattaaaaaagcacgtacaaaactcataggagaaagatgtatacttatgacaacatttggtgataaaattagaaagttgcgaaaagagaaaaaaatgactcaacaaaagctgggtgctatggtcggcgtttcttatagaacaattcgagcttgggaaattgatggacgatatccaaagcagagtagtttatatcaaaaactggcagatgcatttcagtgtcaggtttcttatcttatgaatgataatgaaaccgtgtgcttgggtaatgatgagccaagtgaatattctggtgctaaacaggcaaggcagattcttgaacaggcagctgctttatttgccagtggaactatgaccaatgaggacaaaactattttcatggatgagataacgagactttatctggaataaaaaaagaacagaagaaaatggtaagaaaaaatgaactgttttgttttcttgcttgctagaaaagaagaatagaacgtataatagtgttaatgatccagagatatttactctggaaatagaattacttgtaccggtggtgcgagtatagattaggagtgaaagaatggtagaagaaactatgttttccggggagtcgaaaaatattgagtacaaggtatccttacccgataaaagtgaaaaatacatgaagacgattgtagcttttgccaatacacaaggcggcaagctgattgttggagtagatgataaaacacaccagattgttggtgtggaaaatgatgtgttgtttcagctgatggacggaattgccaatgcagtttctgattcctgtgtgccacagattattcctgatattgagccgcagacagtagacgggaaaacggtcattgttgtatcagtagaagctggaaagaacagaccgtattatctgaaatcaaagggaaaagataatggtacttatatccgtgttgcaggtacatcaaggcaggcatttccggagaagataaaagagctggaaatggaaggagccagaatctcatgggatgagcttacttgtgtgggttatcctgtttcagaggaagcaacagagaaactttgtcaggatatcgaaaagttccggaagaaggcaggaatggcagagcattctgtaaagaaagagcagctgataaactggaaaatcttgaagcagagcgagggacagcttctggcaacgaatgcctatgcattgctgacatcagattatttttcattcgccaaaacacaatgtgcggtattcaagggaacagatcgtgcagtgtttctggataagagagaatttacaggaccaatctatacacaaatcgaagaagctgtagactttgtattgagaaatattcgactcggagcaacgattgatggattggtgcgaaaagagaagtatgagctaccaccggaagcaatcagggaaatgatcattaacgcccattgtcaccgtaacctattggatgaatcctgtattcaggtcgcagtttatgatgacaggttggaggtgacttctccaggcggattatataacggattgacttatgaggaagtcatgaatggtcattctaagatccggaataaaggtattgccaatatattcagtcagatgggactcgtagaagcatggggaagcggaataaaaagaatcctgaatgctgcagaagagtatggacttccgagaccgagatttcaggaatttgataatatgtttcgggtagaggtgttccgtaattcatttccgatgacaaatgaaaaagaaagcatcggagaagcatcggagaagcatcggagaagcatcggagaagcatcggaggcagagtggagaacagatctcaacgatacacagcaaaagattataaagttgctttcagaagatcatcaattatcagcggttaagttagctgaaaaaatcggggttgccagtcgaaatattgagaacaatattaagaagttaaaagagtatggtattcttataagacatggatctccaaagaatggttactgggagattgttgataaagatctacaggagtgagaagtaaattagtctaagattagtccaagagaatatatagataaataacaaaaatagattgacattttgtagtaattagtagtaaactgtacttgtggaagggaagtgatatgtttggctagaaaaacaccaaaagatggcaaagaagaaaacatacgagtacgggtgactccagagcaaaaacagagacttgttgagtatgcagaaagacactatcagagcatgagtggtgttgtatgtcaggcattggatctcctgtacgcaagagaagaacaacaaaataataaagagtaaaatggagttattttggagtttatttcttcataagcggtgcgaaaagcacagaatcagaacatatgttcgaactataagcctctaataacagcctttgcgtgtcatgaaatgcagtccgcaaaggagttcaagtaaaaaaattttctgaaatcccttataaacagggcattttagagcagataaagttctatttgataacaaaatgataacacgagagattttggcattatttattcggaatcttgtggttatcaggtaatatgtgtaaaaccaacaaaaaggtcttactgaattgagtgaaatcaatttggtaaggcctttttcgttggttttttttgtcgttttttggatgtaaacggtagaacctaagtaccttgaaaaaatatcttcaagaatgcatagataaaactggcattgtatcgaaaaccttgctatcatccgactggcatcacgaatgggactccgtgcaggcgacattgcaaagtgtatcggctgttcttttttgttttaggtgttaaaacggtattgtttttcttgtgtgcagtagagcgctatagtataataaaactagtttttttgcataagattaaaagtttaaataggatgatcggcaaaccagatgaaagtctgggacgcaaagctacagggcctgtaaaatggcagccagttgtatgaaatgaagtgcactgtctgtgggacagtgttttttatgtaagtaggaaattacttcataatgttcctgttacataaaaacgctccgcgaaaatgcgaccagatacatgatgaatatgtctgctgaagcagactgcatccggcgcgcaaagcgtaacaagcccctcaaagattgaggaattcagggagtttgaagcggacttgtccgctttgtaatgatgttatttcatagacgcaactataacgattttatggcaggggatcagatatgaaaaaaacggaaaggatagttagcgatagacagaaaatgaaaggaaaaagagtgattgcaggcattctgcttgcgggaattttagcagtcaccctggtagggtgtaaaaatacagataacacgaaagaggaaacagaaaagcctgtgattaccctcggcagcgacaactatccaccatacaattatctgaatgaggatggtgtatcgacaggtatagatgtagagctggctacggaagctttcaaaagaatgggatatcaggtggaggttgtccagatcaactgggagaagaaaaaagaactggtggaaagcggagagattgactgtatcatgggctgcttttctatggaagggcgtcttgatgattaccgctgggcagggccgtacatagcaagccgtcaggtggtcgctgtaaatgagaacagtgagatctataaactgagtgacctggaaggaaagaatctggctgtccagtccacaaccaaaccggaagacatctttctgaaccggacggatgagaggattccaaagctgggtaatctgatcagcctgggacacagggagctgatttatacctttcttggaaaaggctatgtagatgcagctgccgcacatgaggaatcaattgtccagtacatgaaggattatgatacaagtttccgtattctggaagagcctttgatgatcaccggaataggtgtcgcttttgcaaaagatgatgacagaggaatctgtgaacagatgagccagacactggaagaaatgcgtcaggatggcacatctctgaaaattattggaaaatatctggatgatccggagaaatatctggaggtggatgatcttgggtattaagagaaagaaaaaagaaaaacgactccagttgttcggtgctctgattggaatctgtgtggctgtagtctctctgttttatttctttcacgcagaaaaagcagaagccgagaaaagaatggtagagattgtaaactatgtcaaagtgcagtgttccacctacacccattataatgaatctacggaatccaaaagtctccttcgtgccattgaaagtgcaaggcagatgagtacaaatattaaaacggaaaaagaaaacggcggtcatctgagctgggagttcctgaaagaaaacctgcagactctctgggtggatggtatcattgtactggatacagcgggaaagacggactgcgaatacagcaccgatgaatctctggccaacgagattacggcgtatctgcaaaaagaaattatcatggattttgccggatatgaagaaagatcttattcagaacggtttgccaggaaagacggatcctatattgatattgcagcctgtgccagaaaagatgcaccgggtattgtggcaatctactattacacacctcccgaatttgccagaaactatacactgacgatacaagggcttttaaatggttatagtattcagaaagatggaacgattattgttgcagacgaggggattgttgttgccagcaatgatgagagcctgctggggcagaatacggctgacaacgaagttgttcaggcaatgaaaaagcatacagacagtcagcacattcaccatttgaagaatgaaggaatcggatgttatggaatcatgctgaagcagagggattattatatctatgcgtatcttccggatacggaagtgttccataaccttccattaagtgtgataagcgttatgttcctttattttctgatgtttagtatattctggttctggacatatagaaacaatctgacacaccggaaactggaacgggaaaaagatgaaaaatataaagaagaacttctgatagctgcaaaaaaggcagaggctgccaatcgggcgaagacggaatttctccagcggatgagtcatgatatccggactccgatcaatggaatccgcggcatggtcaatatggcagaccattatgcagatgatatagagaagcagaaggaatacaggacaaaggtgaaagaggcatccaatctgttgctggaactggtaaatgatgttttggatatgagtaagctggagtcaggtgaaattgttctggaagaggttccatttaatctgagcagtatttcagaagaagtacttgttgtgatcgagcagatggctgcaaaacagaatatccgaatcatgtgggagaaaaaagaaatcatacatcggaattttattggaagcccggggtatgtgaaacgtgtgatgatgaatatcctgtccaatgcggtgaaatataacagagaaaacggacatgtttatatcagttgcatggaaattccatccgaacagccggaaatgacgatgatggaatttgtctgccgggataccggagttggaatggcagatgagttccagaaacatatttttgaaccatttgcacaggaacatgcaggaagccgcacaaaatttgccggaacaggtctgggaatgccgattaccaaaaaactggttgaaaaaatgggtggaaccattacttttgaaagtaaaaaaggcatagggacgacatttgtgatccggatcccgtttaaaatagacatggattcggacaaaggaaaagaacagacggatgtatcagatgaaaaatctataaaaggactgcatattcttctgacagaagacaatgaactgaacatggaaatcgcagaatttatgcttcagaatgaaggtgctgacgtggaaaaagcatggaatggacaggaagctgttgaactattcaaaaaaagtgaacctggtgaatttgatgtcattcttatggacattatgatgccagtcatgaatggttatgaagctgcaaagatgatcaggtctctggaaagagaggatgcaaagaaggtaccgatcattgcaatgacagcaaatgcgttcacggaggacagaataagagcaaaagaagcagagatggatgaacatgttgctaagcctgttgatgtggaattactgataaaagtaattcgtaaattggtgaaatataattgacagggcagtgtcaaataagcaatgaaaaaagtaacagaagtatatgagacgacgattgaagaaatataaaatatggataaaagacaaacaatacttattgtagatgatgcggaatttaacagggatatattaaaggagattctcggagaaaattataattatctggaggcagagaatggaaatcaggcaatccagatgataggagataatctggaaattgatctgatgcttttggatattaatatgccacagatgaatggttttgaagttctggcaataatgaaaagaagtcggtgtctggaagaaactcctgtaatcatgatttcttctgaagaatctgttgatacgatgcgcaaagcatatgagatgggaatcacagattatatcacacgaccatttgattctgtgattgtaaagaaaagagttcagaatacattgggactttatgcgaatcaaaagcatctgattaatgttgtttataatcaggtttacgaaaaagaagaaaataatagcatcatgatccggattctgagtaatgtattgggatcacgtaacagtgagagcagagatcacatcctgcatattaaaacagtaacagaactgatgttgagacaactggtaaaaataacagatgcatatcctatgaccgaggtagatattgctttgatcacaacagcatcttctcttcatgatatcggtaagatttatattccggaagaaatattgaataaaccaggcagacttaccgatgaagaattcaagatcatgaaaacgcatagtgagcttggtgcagagataatccagaatatgaatttccctaaagacaatccattggtacatacctcatgggaaatctgcagatggcatcatgaaagatgggacggaaagggatatccggatggtctgaaaggtgaaaaaataccaatctccgcacaggtagtgtcgattgctgatgtttatgacgcacttacaagtgaaagatgttacaagaaagcatttgatcatgacacagcgattcaaatgatcctggatgggcaatgcggacaatttaatcccctcctccttaagtgtctgaaagaactgagttttcagctttcaaaaatgcttgataaagggatggaggacaatgaatattaccatgaaatacagagactttcgaatgaaatactcagtgacagatctttaccgaaccaaaattattcgcagagtgttgtcaaggttatgcaggaaaagatcgatttcttcaaatcgaatagtggcatgaattcgattgattacaatgcaatttcaggtcagctaactatattaaacggaaaacagcagataatatgtcagagaaataatccgaaaattgatctgttcaaaaaattcggagtaaatgaagaagatgctcaatatgttcgtgttttgttacatcagacatctgtgcaaaataaagaaatctctgtgcagataaaggcagtggtggaaaatgacggtcggatgtataagctgaaactgcatacgttgtggtcgcctttaaagaaggatggatacatcggaatcattggatatgttgacagtgtaaaatagaaaaatgcaaaggaaaatcagaggatgactcgtgatgaaaaagaaaaaatggagcagaaaattcatactgaagccccatcattgagttaaaacttattattaaaaaaggagcaggattcaaatatgcaaaattcagactatcttatttcagaaaatcccatgaaagcgctcgtgtttttctcacttcctatgatcattggaaaccttttccagcaggcctataccatggcggattcggctattgtagggcggcttgtaggagagaatgcactggcggcggttggggcggcttattcactgacgaatatttttatctgcattgctattggtggcggaattggtgcctcagtcattgtcagccagtatttcggacggggcagttatggaaaattgaaaaaagcagtttatacggcactgatttcctttctgctcatcagcggactgctcggcggattcggactgttgttcagcagaaagattatgattgtcctaaacactccggctgaggtgctggatatgtccgttacatatctgaaaatttattttctgggtctgccatttctatttatgtacaatgtgctgtcctccatgttcaatgcactgggaaaatcacggattccgttatattttctgattttttcttcggtatttaacattgttctggactggatctttgttgcgaattttcacctggatgtagcgggagtcgcctgggcaactctgattgcacagggggtatctgtagtaggttcttttaccattcttttgaaggagcttcagacgatggaaggaaatgcggacggcatttttgcgaaagaggaactgcttcccatgacaaaaattgctcttccgtccattttacagcagtctactgtatctattggaatgatgctggtgcagtctgtggtgaacagttttggagcagaagcactggctggtttttctgcagggatgcgtattgagtcaatttgtattgtgcccatggtagcaattggaaatgccatttcctcttacacggctcagaatattggagccgggcagcagaagcgtgtcgtgaaggggtatgtgcaggcaaataagctggtgatattttttgcagtgctcatttgtgttgtactggaacttttcccagagcagctgattgcactgttccttgggacagagggcagcagcactgctttagcaaccgggcaggcttatatcggatttatgggatttttcttttgcatgattggttttaaaatggctgtggacggcgtgctccgcggagcaggagatatgaaaatgtttaccattgccaatctggtgaatttgagtattcgtgtgagtatggccatgatgctggcaccgagatttggtattgaatgtatatggtacgcagtgcccattggttggactgccaactttgtgatttcctatctggagtatcgcactggcaaatggaaaacgattaagaaaatatgaaactgaaaatggcgcgacttcggtcgcgccaaatcttttagctatacggaccagaaaaatcgaagaaaacttctcgcagaaagagtagatatcggtaagattgcaagaggggatattgctgttaccggtgcatatcacttaaaggcaaaatatattattcatacagtaggaccggtatggacagatggaaagcatcatgaatttagtaggtaattttataccccacctgatgttataaaatatagatataaaagacctaaaatgaaaaattaaacctgtactttgacaactgagaaaaactgttagtttccagttttggctgttccccggaaactgcagatcttgaattttctatgacaagagaaatggcaaaaaagaatggaatggacaaaggtgataacctggcatttcatctgatccagtcatttaaacctggagaagttgatgccgaaactgcccatcgcttagggcaacaatttgcattcccgtaaacacctgaaagaagtcagttttggtgaatgtatatggcattttttagcagtgcaattacaactttaaaaactcttgtagtcgcaatcggcgcaggtcttggcgtgtggggtgtcgtaaaccttctggaaggatatggaaacgacaatcccggtgctaagagccagggcatcaaacagctgatggctggtgccggaatcatgctgctgggaactaccctgattccacagctggcaacattgttctcttaagaggagtggtagatgaacaccatcattgagagaattacggaagcgataaaggatatcctgatcgggcttatcaagtcctgtttggataacatgttcacgtctgtcaatgagcaggtgggaaccatagccgggcaggtgggacagacaccgcagggatggaatgcacaaccatgatcagatgataatacaccaaatatactgaatgtgcattatgatccattttgtccatataatcagtcctttcgactgattatagtataccacacttcgcgcagcagaacaagcgttctattttcttttttctgcaattcatctcccacctgtagaggaaggagaattcttgctaacttttgttaaaattgagaatagaaaacaccgggaatgccgtcccggtgttttcgttgtagttgttctgcatgaaccaactgctatcttttattgcctaatggcattatagcatatgaaattttctttttcaatatacattaaaataatctacttcattgacagtcataaaaatcccgcttatacttagtgcataacaaaataatatgtaactgttcagagccaggcaaaatttcaaaaagcaggtataaaatgcttgcattttttaaactgtttttgaaattttatttggcggatacgccacaccgacgaaatgcgtagcattttggaggctggctctgaacagttacaataatatatttaagaaggaatactatatgaaaagagtaattggaacaatcatattgatcattgccatcatctgctttggctggagtgccttttcccttggcaaatacgcatggcaggcacacacaacccagaagaacattgaccagctggctgacagaattaacactgatgccactgaagcttccgatgattccgatgactccgatgaagaagaccctgtggctgaatctgaggccatgatggagaaatacggtgatttatacaatgagaataaggatttcatcggctggctttccattgaaggcaccaatatcaacaatcccgtcatgtacaccccggatgaccctgagcactatctgcgcaagaacttcaacggcgattatgatatcggcggtatgctttttgtcgattccagatgtaccttcaacccatccagcactgacaccattatttacggccatcatatgaaaaacggcaccatgttcggcccgctgatggatttccaggacaatgattatctgaaagaacactctgttgttacttttgataccatgtatcgtccgggcacttacaaaatatttgcctccttccagtccaaggcctatgacccggattcagaagaattcaaatactatgacttcatcaacgcagagactgcctatgattttgaagaatatctgaacaacattaaaaacctttccttgtactatgacgaggaaaatgcaccgtcattcggagatgagattattacactgtccacctgcgattactatacaacggacggacgatttgccgtactagctaaacggattaaataagcgagccaatgtaacaaactaccgcgaaatattaaaatggcgtgaaaaagattttttgtcttcttctcgccatttttaacgatttcatttctaccattcatcaaaatcatcccggcttttgccatagctcctcatcgccgaacgccatctaatctgataatcacttgtcattgggtctgtttcttttccctccggcacaaatgcaagaaattctttatatcttttttctgtaaaccgtactctcattttcttaaatttaccatttgcagtaaaaaagatataaaaaaatgccgcctccgaaccacaactgcccactcctactcgattgatttgcgaccactcataaaaaatcacttttttactccgccgtgtcgtaatttgtatcccagttctgctgactatccattcgtttccccattccgcatcctcgccataaataatccatccggcaattgccgcaataatcaataataaccatgcatatcgaagcaatgaaccatattcaaacgccaaaataacataccaaccaaacagcattaaagctataacaatcgcagataacggctttatcccgccatttaattttttcccataaaacgtctggtcactaattttcaattcaccctgtatatcttgcaaagcacaaatacttttcgaatttttcctttgctgcttgtaccaaatctgctgcaaatccggttccaataccttaacaccatgccgtgccatataaacactcatcttgtcccatatttccggcgtataacttatttccagcacagagccgccaatatctcttgaacaggtgattttagggtaaatcagacattccacccccagacaatcacattcaccccaccttctgaccgttcgaaatacactgctgcgatatcttatggtaatcccattttcatccaacttataatcatgtctgtaactatcccaaattaacagcaaaccaagcggaactccgccaatagaaaatgaaaatatccacagaaaaatttcggctattaaactttcatcataaaccgaaccatgccaccactgattatacgatatcactgcaaaggatacgataagacacagaagcgcaatcaaacatatgtaaaatccaatcttaaaaattatctcatcccgccgaatgatcaaaggttcttccatccgcacatcatctccccaataaatccattttttaattcctattcccattccgatatttttattttacaccaacaatctaaatctttcgagtctatcattatttacgagacttctaaaaaatatactgcctgcagctcaaaaactacagaaatgggattagaaatgcatggagtgcggtcaaaacttcaaaaaatgggttcaaaatgaaacagttcaagcacaggtgcttccaacatggccagtacttaggcactgtcttttagtgccttacgtactgctgccaatgttgggcaacgcgagtgtgcctgtgttgaactgttcatttgaacccatttagcgatacattaaaaaccgcactccacacattttaatcctattaccgatacctttaagctgcaggctcgctattttttagtgcagggctttcagtgtatggaacgcctctttcatatcctgtttcaccagttttttctgcagcgcatactgtttagcgtaaaaatcatgattttccgcattggtataatacagtttcttaatctccagactttctgtcaatgccgctttcatatccgtgatatgtcccagtgcataggcaccgacgatacagtctgtcaccacagcgccgccggcattcttcaatgtgatcacttcgctgccaagcatgtcggatttcatctggttccagatttcgctgcggctgccgccttctgtgatcgtaatccggctcatatccacaccggcaccacggtacaggtctgtaatttccatatagtcatagccgatagcctctaataccgcatgccagagagtagcctgatctgtatccagcgtcatgttaaggaaacagcctgtggcctctttcacgtcattggtaccgcccgtcagatacggcaggaataatacgccatcagagcctgccgggacatctttggctgcattgttcagtacatcaaaataatcaccgtctttttcctgcccgcagacagagtccttgaaccagcgcagcgccaagccgcccgtacggatatagccccagtagaaataggtatccggcaatgtaccgctgttgaaaatcagtccggcccccttcttactgagttcaggaataatgccttttgtggaaacgcagaacatagaacaggtgcctgccacatccacagcctgtcctgctcccatattgccgctgccaagcatggactgcatcgtatcgccagcgccgccgcaaatcggtgttcctgctgccagtcccgtcttctctgccatttcttctgtcaaatgtccgacaatatcccatggtttgacaatcttcggcatcatggatgcctcaataccaagaatcttcaactgctccggtgaccagcatttttcttcaaccttatagcccatgccccatccggacatagcgccccagtcgataaacatatcctttgctttcagccccgccagatgtgccagtacataaggcgcattatggataaactttgctccgcgggccttaaaagcttcattattcttcagcagccacctggcaaacagtgccggaaacatgcattttgcctcaggattgcctgtttccctgccccagatatccaaatcccagctgttgatcagcacttcatcctcctgggttcttgaatccagataattaatatatggtgtgatggcattgccctcttcatccacacctgcgattccgcagatgataccatcccccataatagactggatctgtttcggatccaggcctttctcacgcatctgccgactgcattcagccatgccgtttatcgtcaacgccagatattcatccacatccatatccacccatcccggatgagggtaagtcagtgttgtcggtgctgatgtagatgccacgcattccattttctcattatatacggttacttttacactctgtgttcctgcgtcaaatccaagataaaacttttccatttccatacctccgatacattcttgcaagtcagtcatctgcgactctgtacagcattcttttcatggagattacattttatcaaaagtcgcatcaggaaattccggcgaaggatcctgtcagaattttctttttcatatttcataaagaaaagccctgaatcctcacacaaagaattcagggcatacatacaaaggtcaacattcaaataaaatgcaaatcttcttctctctcatccagactatactgtcggccccggaatctcaccggatcatgcatcagaaaaataatcatgccattcttcttcgctcgcgggctttaccgccggtagggacttgcaccctgccctgaaaagatgttttacaacatagacattataacgctttatatgtcctatttcaatatatttttagttaaaatgcctaaaaatatacatttatcatcgaatgtacaaaagcatttctcagatcgcactgcactttctacaaatctgccacgcaggctttcaataccttgccaatgctgtcatggatcagcaggttggcctcatgatcgtatggcgtctcactcttattgatcagtaccagcttattgccatggtagtaattaataaaaccggctgccggataaacattcagtgatgtaccgccgataatcagcacatccgcttccgcaatggcccgcacactcttgctgatggtggtatcatccagaccttcttcatagagcacaacatccggtttcactataccgccgcacttctcacatctcggcacatcctcggaagccgtcacataatccagatcatagaactgaccgcacttcatacagtaattcttcataatggtgccatggagctcatagactttctctgaaccggctttctgatgcagtccgtcaatgttctgtgtaacaactgctttcagcttaccgatcttctccagtttcgccagtgccttatgggcttcattaggttccgcctctctgtaaaccatggttgacttgtaaaaatcatagaaaatctccggctttctcataaaaaatgtatgagaaagaatctgttccggtgaacagccgtatttgtgaacggtattatagatacctgtctcacttctgaaatccggaataccgctttctgtagatacccctgcaccaccgaaaaatacaatattatccgatgcctcaatcattgcttttaacttgagaatgttttcctgttcactcatgaaatccgctcctttcattccgcaggcaagtgaatggtgtagttatttcgaaaacgatgtactagtttcttctgttaaccccgaacccctctggcgctgaccggcggccacctttgctccatgtctttaaggttgatcccggccgcatccagaagtcctttatcgctgatcttcttgaaacaatccagtgcatcatccggcttttcatccaaaagccatgcccggccttccaacatcagataatcatcatctccactttcataccaggccttgtgaaaccactgtgccgctgcatcagcctttcccatacccacaaggagctgtcctttgagcgccatcagatccgccccctccggttcgatacgaagggctttctcgatagctttcatgccctggcgtactctgcccaactgctcatccgccatcgcttcataataatagccgtctgcttctctgccgttcagcacagccgcctgccgcccacacacttcaagccgcttgatttccctcagatccgtacatgtctcacacatcagcgccgaagccagtcgttcgcattctgccagacaagcctcatactgatttcggatggtactctgcagaaaaatatccacacaatcataccgcagcagactgttttgtccaaggttgtctgtcatacacgccatcaacggttgataacgggcatcatcatcttctacaacctcataataccgctctccgaaatgtgctgcaaatatctgcttccgctcattctcagaaaacagccatgcttctctgacatctgcccggatattaccttcaaggaacagagacggacgcatgatcttcttgcgcacttctgcccgcttatagtacccgatcacagcccagccgccatcctgtgcttttacaaagaccaccggtatgtcctccagactttcgctctgaaccgttccctcataaaaatcctcaaggttgatacaaacatccgtattctctttccttgagcgtgtcagggcataacaccttccgttatagtcaaaaaactcattcattaaaagggttgacgcatcttcaatccgcacaacaagaatcgccatctctcaccctcccttctaaaaatggccgcccaaaatgccgcagatcactctgcgataacggcatcttgcggcagccatactcagctgttgcttattagcatttctccggttccggataagtctcaccgaacaattccactgtcatagactggatcttctgctcttcaaccggtttatcctgccatcctgttctgacagatgcaatcttatcaacgacatcaagaccttcaacaaccttgccaaatgctgcatactgtccatccagatgcggtgcattggcatgcataatgaagaactgtgaacctgctgagttcggcatcatggaacgtgccatagacagaacacctcttgtatgcttcagatcatttctcacaccattcatggcgaattcacccttaatgctgtagcctggaccgcccatacctgtaccctgcggatcaccgccctgaatcataaaaccggaaataactctgtgaaaaatcaggccatcataaaagcctttctgaacgagggaaataaagttattcactgtattcggagcaatttcagggtataattctgccttcatcacatctccgtttgtcattgtaattgttacaactggatttgtcattgtatatcttcctttcattatcattctgcagcccttcaacctctttgcagctgcaaaatatcttattcttcaatagttccattgtacagaaaaaacccctttctgtaaaggggcttttcttgttgtatctgtttcttgttgtaccggtttcccgttacatcagttttgtactttcaagtttttcgataaacacttcattgagtcggacaatcggctttctgagaagcagaccgagaagcagggatgggatcagatataatgccatcttagccatctcaaccatgtaataattgccatagaatccggcaatacactcacgcatcgcattcatactgtgtacgaaaggcagcagtggatatacaacctggaagaacttcggtgcacattcgattgggaatgtaccgccgcttccggctacctgcataaccatcagcacaacagcaactgccttaccgatatcgccaaaggaaaccgtcaaagcataaataatattgacatagatcagacttgaaaaacagcccgtgataataaacatcaacggatgttcacactgaataccgaggaaatacaaatctcccagacagatcagtgcactctgcagaataccgaggcaaaccatcaggatcattcgtccaaaataaagctgatgttcctttggattctttagtctcttcttcgcattctctgacaccgtaactttcagcatagccgccattacaaccgcaccaacccagatggccagtgttgaatagaacggtgccattgcagaaccatagttctcaatcggataaatctggttctcatgaagttttaccggagaagcaatgaatgaagccatgctctcaggactttcctccagaagatcggtcagggcatccatactgccgctgtctgatactttcctggatgctgtggtaagtttgtcagaagcatcttttaacagattcaccgaatcttccaatgttttctgaacatccgacagatccccggatgcattgtcggtgacacctgcaatatcctggacactgtcattcaacgctgtgaacatagatgtaatggaggaatctgtggatgacagactgcctgccagatcattcagaccactcttgacattctcttcatagcttgtctttacttcttcaacagaatccgttgtctgtgcgatcagatcatttatttctttcttgagatccgatgcatcccctgtcagtgttgtcagactgccggcggcttcattgatcttgtcccgaatggctgtctgtcttgcaatcgccgtatcgatcaaaccattgatatctctgatagctgtgtttaaaatcttcagggaatcaaaatcattgccgatgtctgtcagggaattttctatctctgtatagcggtcgatcacatcctgtattctgtctgatacggcatataaagcatctgcggaagcctccgcatctgtattataagaatccagcgctttgcccaccgcatctgacacagctgtataaaattccttgttctgtgccaatgcatcagaaatcgtctttgtggtacctgtcaaagcgctgtttaatgaatcaatgccctcaccggctttatcaaaagcctcgacactgttttctgcaccagagccggactgcttcagaaattcagtggttgaatccagcatcaacgcacccgattttgtcagatttgcaaaggactgcactgtattggccgcactgctcaaatcaaaagctacctggttcagggtttttgacagtttgtctgccaactcctgatcatcttcatcagcagcagcattgctgacaagctgaattgcctccagcgctgtttttgaaacggtttcaatgaaagtgtcattcacctgctgctgtacagcgctggcacccttttcagtaaccttcggtgcaatggcattttccttctcattaatataataaataatctgaggatgtgtcacatcactggtaaaaacactcatcatatccttggtaaaatcctcaggaataacaagggacgcataatatttgccggatttaactccatcggctgcatcatctgcatctgtaaagacccagttgaaattgtcattttccttcaatgccttaatgacatcatcaccaagattcagatccacgttgatcagttcacttgcataccctgcatcctcgctggccacggcaattttcaggccatccgtactaccatacggatcccagctggctgcaatattgaaccatgcataaagagtcggaataacaagaatacccatgataacgatcatagcaataacgttattatgaatcttgtttaagtcattcttaaaaacacgcagaatattcttcattattccttctcctttccacggaatttctcaagcatttcatcaaaggacatacctgcaatcttctgctgttcctgcagattattgtgaataaattcaacaacgatcagccatacagcgataataatgatcgaaaggatccacaggacaaggaatacgatctttgattccagactgaacatcagaacaagaaaaatcagcggaataatgatgatcgccaggaatccgaaacgcaccatcttcttataattgccttcaaaggcctgtgcctttgcagctgtctcttctctcagattgtcaacagacagagatgccttcaaaatcattctcagctgttcatgacggctgagtgtttcatccggttcttcacagatcataaactctgtctctgaaagctttctgtcaaacagacggttcagacctaccagggccggtctgaggccaagtccgatcagcagtgaaatcggcacatagcataacaacagaatcagtatatctttctcatagacatgtccatatacacctgctacacattctctcatagcaccgacgccatacgcaaacggcaggaacgggtgcaggttctggaagaatgccggtgtcatttcaatcgggtatgtacctgatgatcccggaatctgaagaataaccaggataacgcacaatgccttgccgatatgcttgaatgaaatagacaatgcataaataatattaacatagacaaaagaaagaatcataccaagaataaccatccttaccggatgcacgacttgcgcccccggaagcagcgtatcacccagacacacaacaaagccctgaatgataccgatcacgacatacagcagccatctgcccatatacatctctgatgccgtatagtttttcatagatttgtctctgtctacttccatcttaatgatcgcgatcagaacaataccgcccacccagattgccaggttggaatagaatggaatcatggaagaaccgtaattcttcactgcaaaataagtctctgtatccagttcaaccggtgatgccataaactcagaaatctggtcagcatcaatgccttccagtttgagcagtttgttatatgcatcggaacttacaagcgcattcacatcactctggatgtcattcagcttgccactgacacttgccagtgcagaggtcgtaccgcttaaagcgtccctgatatccgcaagacttgtatccagctgattaaaaaccgactggaactgctcggaagctgtcggtacgccattgagcagaccggacaactcacccgtcagacttgagaatgtatccagtgttttgtccagttcaggaataacattctgagccatggaaatcctgaaagcatggatactgccgatactgtcagaagcaattcctgacagctgttcacgtgttgtggatgttgtggagattgcatccgaaatgctgttattacctacagtcagactgtcgatcagtttctgattcttgtcattctgctcctgaagactggcaatattgctgttcagtctgtcaatgatatcattggcaatctgtccatccacttcatcattcacttgattcacaagatcctgcatattattcaggatctcaccatttaatgatacaacagaattggctgaatccagtgcatcgccaaccgtcgtattaatcttgcctgccttggcttccaactctgtcagcccctctgaagcagaactatgtgcctggttcaaaagcagctctccattggaaagtgaccaggacaggatggcggaaaaatctccggctgctgttctcgtattctgaatgatcgtatccgcgtcatccagagcagatgcgcctgaggccgctgcgtcatccagtgaacctgctgccttctgggcatctgaaatcagatccttggtggaatcagaactgttgttaaacttgtccaacaaatcttcgtacgcctgaatattggcatctgccttcttcagcatctcattgatgtccgtattcacattgcctacagcatctgctacatctgtcacagaatttttaacaacatccgacacagactctgctgcaaccgatgagaatgtactgttgatctgagactggatcgtacttgcacccgtactcgtgatcttcggtgcaatggcattggctttctcattgatatagtattccagttccggtgtattaagcttgcctgaaaggacacttaacaatgattcactgaaattgtccggaataacaatcgctgcataatacttgccggatctgacgccttcaacggcttcatcttccgacacaaaggtccatcccagctgatcattttccttcagattcgtaataatctcgtcacccgcattgatcgaaaggccattgctcgacgcctcctgatcattattggcaacagctaccttaataccggatgtgttggcataaggatcaatgtttgcaacaatattgaaccatgcatagagtgacggaatgatcgacacacctatgatgaccagtaacgctgccgggttgcgcaaaatccgcttcaaatcccggcgaaaaatccgaaatgcatttctcataaaaatgctcctttttcataaattgttccattaatagataacatgttgattttctcataaaaaatattatattaatggacagcataatttacaaccatcaatcgtatgttttttgttcattaatggtcacttgttttcaaaagtgtctaattgtgatttttgtcattcaaccgatgcctttgcgtgctgcttacagctgtgttttgtccagtttttcgatgattttcttattcatccggtcataggaacgccacgactcctgactgtctgcaatgccgaccttctcacagatatacctgataagccacataatctcatccacggattttccggtccgttcttttacccactcaggtgttgctgacacaatgctgtgcgccgccagattgcggactttctgctccacattcaccagttcctgaacccgctgagccattagcgcatcgctgcattttgcctgaacaatggtatttaattgataagagtatatcggaccatacctgaaaccatcgttaaacttgcgatctagaatttgcagcacctctgaatttgcaagttttccccggctccatttctgactgtctcggcttgaataataatcttcaatatgaatgttgcaatactgcttaatcactctttcaagtaaatccacaccaagtggtgtgatcgctctgataaaatccgcatattctccgcgtttgactttcaaatcaaggcttaaggtatattccaaaaggactctgttctgattttccgccttcaccggccagagcacaccattattcttcggcagaaaccgattcatcctctcccaatcaagcactgccctggcatcagcggcttcaagccagtcataatcttctttgcccagctctctctgaatttctctgcctacctgcaaagccgcatgataatcataggattgcagatgcttcttgatcatatccatcttcagcaactgaacaaggtgcatgcatcgtacttcctcgcaacgcttctctgcctccggctgattgtcctcatccagttcccagtttgtctccacatcataatcttcacgttcttcatgttccagattgctgcgccgcttcggtgtcgatacctgaatcggcaaaaatcgatattctgcaagggttgccatcaccaacagtgcgcttttcatggccggtgttcccgatgccatattcacgatcagtgtatcctccggcatcatctcttcctctatatccgcaatgattcctcggaacgcatgataaaacaggtcatactgctgtacatccaccatctgttcatcccggatgatccgcacttcaaaggtatgccccaatttttctcccagtaattctatgcttctgacataacgattatctttctcatgatgtaggatcatctcatgagacaaatagaggattactacgtccggcttgtaatagcggcaaatatgcagcatagaaccatcgtaaaaatatttaatcgggtctgtattcccgattggtgaaaataaatatgtcttactcatatagcacatctctctttgcgtataaatacaattgtccagagccaatatcctcataatctgaccctgaacaattatattctaccatatttacaaactgaagtgctacatatttgttttataccaaaacaatttcctcctgctgttttggaacatctccccaggatttcacacgaccttttccgatcatccggtatattcggacactgtcttccccactggcaggattgatatagtacggtatttctcttaccagtttttcatagcttttctgcgaaagcatggcttcaaaagccgacttctgtacgcgtgttccatagccttccaataatttggcaaatttggttctccgcttattatccacaatatcataaataatcaaaataaactgcctgtcatcctccagattctcagctatctgaaaataataatcttcatcttcggcaccaaatgcatgcatatctgcttcctgctccgcctcataaaaatcgcccttaaaaatgttttcatcggatgataatcggctcatagatacttgcatctccttcctcaatggcttttgccaggcgatccatctgaagtaaaattgcccttctgaaactgacggccgaatctgtatattttaaatatctgacctctgttctgaactttctctccagcttattgagaaaaatctttaacccttcccgtgtcagatagcatcccggttgatccagatctgtctgaaaatgttctttctttatttcataaccattaatcagactcatcacggttgcatcgacaatgactgcacgccactcttccatcaggtcacttgcaagggttggatgtttttccgcatcccgatgaataaacccaaaataaggattcagccctttcatctcaatcttacaatagacttcattcagcagcagcgaatacccgaaactgatcatggagttaaattcatctttcggaggacgtctgcttctcccctgaaatttaaattcttcgtctatacacttggacagcccctgaaaatagcttttcgctgcctgaccttcaaaaccaatcatctccgttatcttcttgctcgtaagaatacggttacggcaaatcgacatcattttctgttcctcttccagattcttatgcttactcttttcatatcgccgcaaaaccacactctgattcttcaccttggcgctcaaaattttcttcccaagttccactgcaaaatccgtatcatacaatgcgctctgctttcgctgtctttcaacattcacatggcccgtggacattaaacgcccaaaatatctgccgccttttgagaaataagtcacaggtatcccacgcatcatgcactcttccatacatttcgtcgtcacctgcgactgccccatgattgtgatgccttccaatgactcaattggaataaaagtcttcatgccatctttgtacttcgccacacatttgttgccttcaataccaatgagcgctccattttcattcacatacagtaaactcacgtactcatccccctttcatcgttttgcaacgataaaattgcgtcccctgactgggtttcttattgccaaattgtagaccgttgttaagccaaatataggatgtagtgtttccgtcccctctcggggcatcttatttccaaatatgtatcaggaatttaacgaaatctatttgaaatatattttccgtcccctctcggggtatcttatttccaaatagcgaaactctttgggttgaaaagcctaatctgtttccgtcccctctcgaggcatcttatttccaaatagacaaggggttattcttttctgataagttataacacgtttccgtcccctctcggggcatcttatttccaaatccaaagccaaagaagggctactacatagcaaaaatttgtttccgtcccctctcggggcatcttatttccaaatatatggttcattcacgacagaagaggaagatttattctagtttccgtcccctctcagggcatcttatttccaaattgtaagttaggaggcgcttgttaaaatgaaaaaagatttcgaaagtttccgtcccctctcggggtatcttatttccaaatcaattacaaacaaacacaacttaaaaatacacggaggtattgtttccgtcccctctcgggggttcttatttccaaatgagctgtaactccaaactataaagaggcaaggagtatagtttccgtcccctctcagggcttcttatttccaaatttatcccacattgaaaacggtaataagcagccgtctaagtccgcgtttccgtcccctctcggggcatcttatttccaaatgagaaagaaagagtagcttatgtgattgcagtaatagtttccgtcccctctcggggcatcttatttccaaatgaaaaaaagagaaatgcagttaaagattaatcgtgagtttccgtcccctctcggggcatcttatttccaaattattttctaagtctatgatgccataagaaacatgtacttcgtttccgtcccctctcggggcatcttatttccaaattgtgtaacaggaaacataagagatagaaattactatttgtttccgtcccctctcggggcatcttatttccaaatttgttaaaaaggtgatacttggtgacatggaaatagtttccgtcccctctcggggcatcttatttccaaatatagatgaaacatgggaatatttaagcagtttaaaatctagtttccgtcccctctcggggcatcttatttccaaatacaaacacaacttataattgaaacggaggaaataaagtttccgtcccctctcggggcatcttatttccaaataaaaaatgacaaactatgaaaaggctatgaaattattgtttccgtcccctctcggggcatcttatttccaaatgttcatgataattggtattcgaacaaacagtaataaaagtttccgtcccctctcggggcatcttatttccaaatggggtcagtatatctttcttgtgagctatagtacagtttccgtcccctctcggggcatcttatttccaaatagaaacaggatacatattatgaaaaggaaagaatgatggtttccgtcccctctcggggcatcttatttccaaatatctttacattagtgttgcacgtgacgaatgtaatttagagtttccgtcccctctcggggcatcttatttccaaatactgcccgccagagcccgctattttgctggcttttctgactcttttgcgtggcaaatcattttcttgtatatttttcttatatctaacatacacaatcgcctccaaatgcagtatttatgcggtgcgcggaaaaattataaactataccaatactatctgaacagcaattttactttttagaataaacctgttctttttctattttttaaagtactctcattcatagaaattttatcacagactctccacatttgcatctgaaattaaataaaaagtttttcttccaaatgaggaaattatgattagggttacagttggaaataacgagttcccgcccctctcggagtttattatttttttaacatgaattatttcgccaataataaaattccagcgtttccgtcccctctcggggtatctttttctgaatcatctaaaaaattccaaaaggcaatctacaagtatactccgttccctcacgggacctcatccacccgcccggtgtcaaccagtcaatgccatattcactcatatcgcatcaaccggccgtttcccacaccggacagctttatttctgcatttccttcaatcgcagttcgcactgtcccatcatatactttttcccattcaactttgtacacttcagcacatggggtgacacaccaaggcctatatccttgtcgtgcttatgctcccgaggcacattgatctttcggaagatatcctttgttacccggacagcttctttctgctggaaaagatcatagataatcgtctttgagacaaatccactgccaccgccaagaaatactgttgcatctgagattggtgccacactctgataaggaaaatgctgctgaaaagctttctcatatcgctgataaaagactttaaccacttccattagtttctcacctgtcaacggactgattgtttcatcaatggtcagctgacagcgaatgaccgttcccggtcggatgcactccctcattaaattcaatgtcttttcagtaccattgacgtgctgctcccatttctgacaaactgccacatccttcattgacaatggttcgctgtcgctgacaataacgcccgccatccagtcgttgactgcatcctgcggtttgcttttcgggcgatttaatgtccgaaatgtctgattttcaattgcactaatattacgactcaaaaccttcttgcggtttctttcattgccattataaaggtcgtcctgtatattttctgccagatgctcgtatttctccggatgttggatcatctccgccccaagaaggattgttcgcagcatgcccttaatagaactgcctgggatgtaaggcttgccgtaagggtctttgatacaggccatgatctgcattcgacctttttcctgctgcatatcaccggcatcgacaatatatttcatgcaggctttcagctcatcgggctttatccggtgactgtctgaccactgtctcagagttatccttgtatcccgcaccataaattgttccatatcagatgccagccctttcttccttgccagctgatacagtttttcaatatcaacaacacccagtgcatgtctgccgtttaagaaaacatattcttttttttgtatttcttcaccgtttcccacaaaaaccggcccctgaacttttaattccagattgtatgtttttaatatctgtttcatacattcacctccagaaataagccataagcgtaacgatagaccggatgtctgccgccatttttctcctccaccatgcagccgtcaaaaacatttttcatacacgaacctgctgccagcacatacaaatctttcttccgcatctgctggtcatcaaatgttgtggaatccacaaaaccgctgcgtttaagcagactataagatgcatctgttaaaacatctttcagtttttcctcttcaggcagcgctgttgacatcaggaccgcatactcacccgacgcagactgcccgaaatggcctgaagctccttcagaaccacttcgcaatgcttttccaagcatatccggaaccgtttttttcacatattcaaatcgacctaagccggcacttttcttgccgccaagcccggaatacgacaaactttccattaaatcatcaaacaatatctctgcagcctcgccgctgcttcccagaatcagatacaggccattccctgcattgaagtaataagcactaacgcggtaaggctccgattcctcatggccacgtacagccactgctgttttgacgccttctttgcctatttccttacaatcctccaggtgtttttcaggatattcccccttcatataagccttgatatattctatcggaacatatttcatatttttaaactgtttcttacgtatggaatttccctgttcctgcgtttctttcaccggcggctgaaacattggtttcggaagaaataactgcctgcccttatagggaaaagcatcagaccagcgaagagcgccattccgaacagcatcaagaaagattttctctttctcaagctttagggcttcctgaaataaggcagcaaacagtgtatccgcatgaaacgtcatctctgtggtttcaagtcgtcctttgccgaaacggacgccattataaaaatccagttgataaatgctgtatttcaattttcacccctccaggcctaaatttctactgcttttttcaaaatctctctgcattttgtcatcgcatcgtcatctacctgacccacaaccacatctgcctccaaggcttcaaaacggattttgccgtaaccacgtgaaccgctgccgcccagataatcatactgcatcagcttcatgccttctcctaatgtttccatatcttccagaaactcgtccatattttccaattcataaatcagatcaagtctgaaaacagaacctctaaccacgcgctcaatctgtcttggattggcaatcgctgtcgtacggttaatagaattctcaaatttgacctctgtcatactctgcaatcccgcatcacgcagttcctgctcattatcaagtaccatatccgagaaaaggacacgacttctcttaacattgcctttcttggcagaaccaaaaagtcttgtcaatcgctcatggtcattgtccggctccacaatcgcctcattaaattcctttgccagcaaacttcgcatcttcccttttaaagaactgcccggaatcatcggcagattgctccgcacatccaggatgaccggtgaatccaccgcaccaatggctgaaaaagcgctgctgccgccgatatgcatacctgttttgacttcaatatcccctgaaattcttacctttgcgtacataattttttctccccctatcaatctttaccgccatagtatttgtgaaatgcgatcaatgcttccatatatcgactgaataagatataattctttttgctgccgttaatttctttcaaaatcgacaaaatatctgcctcttcaacaaaattcttcaccaatgcttcacgtccgcattcatacataaaacgcactctcagatattcaattctgcccttcagatcatcatttaatttatcattctgacagatcatcacctgattataaatatccgctgtcattgccagaagattccttattttagatgtggtgactatcttaagctctcctcgtcctcttcgctgttgttccgctttgtctcttaatgaccgaatcgctttctctgctttatctacataattggtttcatttattgttttcatctgtgccttctcccctctacctgttcatataggcgtataaattgatggctgttttcagctgtcgacaatcttccggtgactggatccattgatacatacactttgaaaaatgcctgtatgcctctttttcttctccgtctttcgttggttcaagccttgtcagcagatagacaagtcttgcaaaaccgattttgtcgccttcacccttcagcattctttcctgctgtcgaatcagttccagtatcttataaaggaaactcctgcctcttttttccgtggtgtcgaaaaatgcggcaagggttcggtatttttcagcaacgactttatcctcaaaatcgtcccactgatatgtaccgtcactaatagacttctcctcgttgtctgccatcatctcatggctttcaccatcttccagaagcgtcaccgcgtcctttcccggcaaatattttgagcgttcttccatcactccggtttctccggcaatcactgcaatcgggtaggatgccccatacataccaatgcctgccgacaagctcaacgttccctgtgtatagcgtttgaatttatttctcaaatccactgccagctcaatcacttcattccaggcacccacaataaatacatcatcaccgccggaatagataatagctgcatttctccgatgcacttttgtctcaccgcttaaattgtactcaccatgttccaaaatatctctgataaaatatttgaaaaagattgaaagatgtctggacaatgtggccgttctcgataatccgctgacttttccgtcaaaacctgatactattgcctgtcccagattatccacatccgctctcaaaaccgcaatgcgcttaataccctttgcagactcagccagctgttcaaaagtatctcctgtgttgtagtcacctacccacagttttgttgcaatgtttttgcctgtgtacagcgcattcttgccgtaaatgcgcaccagtgcatcatccgacatgaacttttttcttacatctttctcatcatggcaggcaatcagactgtagtcccccagcagcggcaatcctttttcctgggtttcatctttaacaacgccgaaaaacttgtcgtaaagaatatttttcgacaaatcactgattttctgacaggttgtacagacgccctctttgttcacatgaccgatgtttttgcagactttgcactctcttgtataatcatccattttgcgtccgttcaaccacaaaatatctgctgcctcataccgatgctgtttctgtttcgaaatcatcatcgacaatttccgataaatttcactatagctgccatccggcatatttcgcagtgcattagctgtacatgctgcatatcctgtcgccacatagagctctgtctgataattttcaagaaaccactgcttcatttcctgctgaaaatcctgaatatgtgcgattgttttctctgtattcggcagcaaaatatagcaatgcccaccaccggaataaatcagattggctctcgacagctctgctttttccagaaacagatcaatgatatgctccatcataatttccagatagaaagaccgtgctctcaatgttttcagcgcatttttggaggtaatggtataaataaagttctgaatgccggatacatccattgaatacaaaataaaagctttttcatcataaaatgacttctcatgctcgaataatgccgccttgtatgaaagtcccttttcattcagataatcataaatacaggctgcaatggccgctgtcagcttcacatgatcataaagagagatatctgccagctcggatttggctgttgaagatggtatataagtcagattcgcctccataactgccatcagggaattgatatactcttctgtccactgtaaacctttcagattatctgtcaatcgctgtcggattttcgtataaaaagcctccgaaaacttcttcttctccgctgacgggtaattgatgccgttgtcatcccccatatccccgggctgataataaaattcctcatgattaccattcaaaatattaaaaatactctgcagtggtacagccagctcaaatcctttctcatcactttccgctttctttcgacggtcagcaaaagctgcaatattgtctgccagataaacaatataagccagactattatcatctaatgcagcccccttcagcatcgctgcatggtgatacttcacacagtccaacacaaccctatctgttatacccacttcatctttcagataatcaccgccggctgtactgtgatttctcctgtctgttccctgtcggtaaatgactttaccgatatcatgaagcaaactgcccgttatcagtttcactttctcttctgtcatttcggctccctcctgttatatcgcatggcccccattcccatgccggtcttaatacccacaccggaaaattcgccaaatctcaacaataaccgcacatatctggccagcgtctccgggccatgtacacgaatactgatattccccacaaatcccgtaatattggttttttccatagggaaaaggattgtctgcagtcgataccgtgtaattgagctgtgatctgtcaactgattcagcaaatcttcatcaatcatatccaactctccggaaacagcactgtatttccgcatcaaactgccgtaaatcaatcgcaaatccggatatatcacataccgaccatcctgcttaaaggctgtcggcgacataaactgtatatccagatatttcggacacgatgtgtcataaaattcatccaacaattcccgctcctcacatcgatccatctgccatttagtcacccctacatcccgaccactctttttaaaaaccacagacttcacttctgacattggttgaatgatctgctcataagcctcctccgtcagcgttttaatacaccagatattcttcccattctcccgaatcagacattgactatagggattcagttgattgccatgcagaatgcctgcatactccgtatctatattctccatcaaaattccttgtaaattggatgacttcttataatcaatatcatctgcctccaattccagcttcaattgtgcatacatggccttccccccatttctcaaaatttgtttttattataccatgtatatcctgcatctgatatctatatctgtttctgataacatttttcctcactaaatcgagtaggagggaaaattaaataaattttcccgacctctcacaccaccgtacgtacggttccgtatacggcggttcaatcaacttaacaagtaacacacctcttggtgtagtaatctatcattgagactaatccaaattgggttagtctttctttgtttattgcaaaattcataactcttcgctgacacacataagcgattcgactacctgtatatgccgtaatccaagctatatccttatcaacttcaagtttcatcaaattctttattcgattttgcggagttttccattgcttccagatacacatacgcaacctataacgaattcttgcatctagttctttgcagagagtttttatactgcctatctcaaagtagttaatccaccctcttataagctgattgagtttctccaccttatagctgttactaactccccagctacgagaggtgaattctttcattcttttcttgaatttcgctactgattttgcgtgtggttttgccttaaactgatgcgctctcgaatcaaagtagaaaccaaatccaaggtatttaagcccttgtggtctatctaccttgctcttggtcatgttgactttgagccctagcttctcttcaatgaatcgtgaaatatttctcatgactctgttggcagacatttcgcttccgaccataataatacagtcatccgcatatcgtacaaagttaagccctctcttttccatttccttatcaagttcattgagcatgatgtttgccagcaatggtgaaaggtttcctccttgtggagttcccacaatggaatcctcatactcatcgtctatcataattccgctcactagatacttccttacaatagagatgacatctccgtcctcaattgttcttccaattaaagtcattagcttatcatggtttactgtgtcaaagaacttttccaagtcgatgtctacaatccagtcatttccgtcattcattatatcgagtgccgttagaattgcctgctgtgcacatctattaggtctgaatccgtaactgtggtcatggaactgttcctcatagattggtgttaacacctgtgcgatggcttgttgtatgaatctgtctgttactgttggtactcccaggtttctgacaccgccatcaggctttggtatctccactcttcgtactggctgaggtttatattttctcatcctcaactgttccttgatggtttcgccgttctttgcaaggtattccttcagttctgtgtacttcattccgtccactccctcagcacctttgtttcgtacgacttgcagatatgctctgttgagattatcactagataatatctgctccattagattacttgtgtccatgcgttctttcctttccgtctcgcttgatttgaccaccttttacccgattggttacggcagatgttgtcatttctgcaatacgagacatactcaaactgattgattgttcgccccttcgctccatccccattacagagacttcttcactactatgggctcggctgacttctcacagttcgttgttactaggctaatgaaacctctgtgagacctccacgcttaaggtgcacgctctttctctccatatatccgccgcatttactctgcttctacaaacgtggtagttattagacttcgctgttctttgccagcttatcactcgaagcctagccttatatgcgatttctgtccgtcggaccagagattcgcttacagcttccttcagattccacctcacagtagacacccttgctgttcggctatacatttcccactacctgggcatgttcgggacttacacccgttagagcgcgcccatggcgcgcaaacaaagaaaaaagcaccctctattaggatgctgatagccattatccgaacacggtgttcaatcatctgccgcttttggtgaaattctggtggacatttggttgatatgaatcatttcgtatattacatattgcataaagcaaaaaaggaatccacttgggattccttctctactcaggtttttataaatcatgcagaagatgggagttgaacactgccatctataagaaaatccagtaaaagaaaggctttcaggacatcttgcattattgcgtgttcaataacgtgttcaacgtctatatattctttataccaattttacattttggaaaaaaatattttatctcatattctccgctatcaaatacaaacttattcaactcatttaagtagtaaacctgcccattttctctatcatacaagtataatgcagtttcagctatatctgttctaatattgaatgtaaccgaatcgttagtggctattgaataccctattgaagctatgttcatctccatattgccatcagttacatttgcaaatgtcaatggcacatattgcaatgcgtcagcatccacaatcacaaactgctcagtgctattctccgcaactatgtcagccatactatcaccccactgactttttgtcagaaaagtagctatgataataacaaacacatatgtcaagcatctattaatcacatcttctttcatatgtcatcccctctctgtattgtccaattatggctaatattattatagcccattattggttactatacaatcataggagtaggcaaatatgattgtatatgataagctttggacaacattaaaagaaaagaatatctcacaatatacactgattaacaaatatcatgtcagtgcaggtcagttgtcacgtttgcgcaccaatgccaatgtcagtacacatacattggatatgctatgttccattcttgattgtgaactctccgatatagccgaataccgaaaaaattagttttgatgactcttaaggccagaatttctggtcttttttattttctacattttctacgtttttaccaaaatttccctgaattctacaattttcccccctcatttcttttcactgctgtgtcacctaaagatgacacctttttatgtttaattttatgtgcactatgtacagttcaccctcttgcgtctgcgctgccgcacaagaaaaatctaaaaaaatcggatataatacaggcaaataacaaaaatggaggtgaaaaaagatgaaactttttaaatcagataattctttagcttttagtcaaatttataatgcagtctcacctgttgaccgcatgagtcatttgtctttattgattacatatggcgcccaaaaccactcatgcattttgtctcaaatgttttgtgataattatgcgttgttttcatctgatactattaggtcattgataaaatgggctgcgcgtgatattcaccgtattgacccacttgcaaaagggatatatgtatgtccccgtacacaaggcaacgcagtacagttagacattgatgccccttattataaaatcactgaccttggattgatgcctacagataaatatgaaactggaagtcatcatagatggtattactggcctattaatgccaattaagggggcacaaagcgctagcggcgtgatgggggattcatccccctacacgcgttagcgtgtagccgtccacgtgcaaggtggcaagataagccgtttacaggcggtgggagttttttaaactgccatatcttgtatggcagaaatagagaggaggaacgaatcatggctagtgtggaaaaattcaccgatgcagcagtgacaaatcaattacagcataatgcacgtgaaattatcactaattccaataaagacattgacaaagcacgtacacatttgaactattctctcacacctgaacgttcattatctccacgagcatattacgcagcccgcaaaaaagaactctatgtatacggtcgaaaagatgtcaaaacaatggccggttggattattaccgcaccaaaagaactgtcaagcaaacaggaagaacaaaccttttttcagagtgtctataactttcttgaaaaccgctatggcaaagaaaatgtcattcaagccaccgtacattatgatgagggcaaaaaagtaaaatctgttgacagatggggcaaagttctgacagatgacgaaggaaaaccaatttataaaattgctgttggcagacctcatctccattttgattttattcccgttgttgctgacagcaatccaaaacatcatcaatccgaaaaaatctgtgccaatgatgttttaaatcgtcaagaacttcaacgtttccatgcagacttgcaacaacatttaattgctgatggcatcaactgctctgtattaactggcatcaccaaagccaatggcagaaattacaccgtcaaagaacttaaagccaactatgaaaaacagcgtgaattagaacatgaatatgaaaggtcaaggtggtaaatatgttcaatacactattgtatttgattccattgatgaaaccattagtattcattacattaattacattcattgtctatataacaattacattccctttaaaagggaaaccttcggaccatgtaacaacatcctctatattacaatctgcaccacctgataatgcacacggtgtcatctttggcaaggaaaaaggtgcagtatttttctcccctgtcaataacgagggccacatagctgtgttcggtggcagcggttcaggcaaaacatcaggactactcattccaacactcaggagttggacaggcaccagtttggtcattgacatatctggggatatatcaagcaactgtaatatacataacaaactcatttttgaacctgcaaaccttcatagtattccatttaacatattcgatgcaatagaccggactactgatatcaacgaaaaaaatgaaaaacttgaacatcttgcttatatgctaatgcctgattccgaaagaatggatgataacgcaaaatttttccttacagagggacgtaaaattctcgcagcagccttaattgccttttatcatcaaggcaaagacttcattcaaatttgcgaatttatcatgggacatagctttcagaaggtgttcagtgcgatagatgccagtcgctgcgaaatggcgattcaatatatcaactcttttgagggtgccaacgaacgaaatacagccggatgcaagcaagctgccgataatgcagtcaaactatttgcaactaacaataagattaagaaagttgtccgcagacctgctaaacaagaactatctttttccgctgcatccgcagaaaattctaatgtattcgtcatcattgatgacgttcagcttgaattatatgctccattagtgcatgtcattacagctcaatgtttggattatttcagctctcgttctgctgaatgcaaacattccattttatttgccttggatgaatttgctagttttggaaagcttgatatcaccgcggccttacgaaaactaagaaaaaaacatgttcgtatcatgatacttacacaaagcatggctgatattgacctaatttatggccgcgctgaacgtatggccatgatgaataattttcagttcaaagttgttttaggggtatccgatacagacacacaagaatattttgccaaactcattggcaataaaatcattcaaaatcatagcatttcacgaaatgcaaaatctgtcactcgcacctatacagataccaaagagtatgctattgaacccgctgaactagcacacttgaaaaatgaattgctgatactttatccagacggctatattcgattaaggaaaaactattattttttgtagaatgtagaatttattgcttttacatgcgaccgggcttgtctgtcgcatgtcccctggttgtagaactgtagaaaaaaatatagaaagaaggtaatttttatgagtattcgaatttgtgaaattgtgactaaccttaaaaatgacaaaggtgaagatttgattaatcttgataacatgaaagattttcttgtcaatagggaatgtatcatgaaatacgcctacattgttcatgataaagacacctactcactggaagatgaagcaaaaaatgagcagcacaaagcaggaacattaaaatctccgcacattcatctattgctcaagttcaggtgtcctcaacaaattggaaacgttgcaaaatggttcaatattaaaccaaattgcgtacaaaaagtcaaatccgaagttgctgcaacagcttatttaattcatgcaaatgcaccgcaaaaatatcaatatgaactgagcgaagtcatctctaattttgatgttgcacaagccattcaaaagcttcaaacaaaacgttcactgaatgatgtcattgataaaattctaaatggtacaatctgcgaatataacaaaactactgaaattgcccctgtaatgctcgtgcaacagaataaaaaaattgagatggcctttaaggtaagagccgaacatctattagccacaaaaaaggataggaacacagaatgcatcttcatctctggaacatccggttcaggtaaaacgacacttgccaaaagaattgccactgacaaaaaactggcctactatgtatcatccggttcaaacgatatccttgacggatacatgcaacagcctgttctgattttggatgatatccgcccatcaacactcggtctttctgatttgctgaaacttttagataacaacactgcatcaacagtaaaaagccgatacaaaaataaagcactctattgtgacttaatcattataacaaccgttttagatatcgactcattttacagcacagtttttaaaaacagtgacgaacccattatgcagcttaaaagacgctgcggtacatacatcaaaatggacagcgaacacatttatatttccctttgggattcctacaagaatgattacagtgaacctctggaatatgaaaatgatgtcattaatatataccgcgccgaccacgctaaaacgacacaagaaattgaagaaaatgtttcttcattgatcccatttctcaaaagaaccgatacaccgcatgatggatttatgaaaattcctgacaacattgatttaccttttgattaattcgatacactttaaatagccaattttgccctttccttgttcgcccatccccctagcgtctaggggtggcaggcgggacgcctgacggggtacggcctcaatacgttcggaaaggaggtgtctcttttgagtataaatatccacgatgcattgcaaatattaagcactattaaaggcttaagtgattatcaggcattgacagagcttgaaaatcttgctaatttaaaaccaatgcaagatgttctgaatgatattgaagatatgaatagagaatattatctaaagagacacccttaccagatttattattcagaaagtgataagcgttggagaacatacctgcccgattctaccaaaaagaacggtcggaaacctatcacaagtaccaaacgcgagaaccttgagaataaaatagttaaatattatgaagactgtgcaaaagcaatcgccgtgcctgcggatactatcgccctcttatatcctgaatttctggcatataagactaaagaaacttcacccgccaatgcaaataagattaattgggcatgggaaaaatactataaaaacgataaacttgttaatcggcggttaggtgaattgactgtacctgaattgaaagagtggtttcttgacaagattgctgattatcaacttaccactcgtaaatatcgtgatatgaaagcgctcatgaatatgttgtacgattatgcgatcagtttgggattggtcacttacaatgtttcacgaaatatcaaaaatatttcgtataaaaaattcacccctgaacgtaaaaaaagcgtaaccgagcaaatttatattgatgatgaggaaacacgtttagttgaattggcttataaaaagttcgaagaaacccacaacactgcttatttagccatcattctgaactgttctcttggcttacgtgttggcgaacttgttgcattaaaacgcagcgacttcaactttaatactaacactgtacatattcaacggcaagaaagaaaactttatgacccggaaacgttaaaacgcagcggttttgaagttgttccttacacaaaatctttaaattctgacagagtattgattttaacaagtgttgcacaacaggcatacaagatgattgttaaacacaacatggaaaatcaattcttttctgaatatctgctgttaaataacgatggggttcgcatcaacaatgatacgattaatcggttattacgacagctcaacaaagaacttggaactgttcaaaaatctaatcacaacttgagaaagacatgtctttcaaatatgaatgcatcgcatctcttgagtgatgaagaaattagaatgtttgcaggccataaagatattgccacaacacagaactcatatatctttgcaacgggctctttgaacacgcgttcagaagcctatgaaaaagccattgacagcaagataaataacgtgttcaaacgtgttcaatgagaaattgcaaaaattcaacgacaaaaaacaacgggaacccttgtaaatcaaggattcccgccgttttcaggttttaattaagacatgcagaagatgggagttgaacccacacgagtgttacctcactagaacctgaatctagcgcgtctgccattccgccacttctgcgtgctcacttataataccagatgcttttgaaaaatgcaagcctttttttgaaaaaatttaaattttttcaaaaataatgacttttatcgtatcgacggactgctgcgctccggagaaattattctttgaatgcgaacatacgctgtccgatatagttaaatccggtgaacagacacataccggcaagcatggctgcattctcctgaatcttctgaccggcgccggataatatgtacataacaaccggttttgcaataccataggccagcacatagcataccgctatgttaatgataaatttcgccacctgcttccatgaacgttctttattctggaatgtaaaatacttgttcaggaaaaagctcaaaatactcgtcaaaatataattggctgcagatgacacccagtaactgcaggatgccagattatacagaccaaacatgatggccgtaccgacaacggtattaatacagccgacaatgataaatctcaataatttctgatcaaccagactcaatatctttttaatcattctgcttctatgcctccttggttttgccggatttaaactgttctgcctcctcaatcggatgcatcagcccgtcttccacccacacattattttccagatgaattttataaacacaacagtttgaaagtcctgaccgccagaagtctttcaattcacagtgattgatacagctcataatacctctcaaagcagccccatgagaagcagccagcacagtatgtacactttcatctgatgccgccatttctgacagcatatccaggaatttctgtgcacgggtctgcagttcttcaatactctctgcaccttccggcggaatataagactccggtgcatcaaataaatccttaatcagcgaatacggcttgccttcatctacaccaaaatccatctcacggattcttgcatcaggctgcacttcttcaaatgttctgcccgaaacgatggctgccgtctttcttgcccgcacaagtggacttgcaaaaactctgtcgaatgtaatattctgcttttcaaaccactccgccgcaatgccagcctgctgaatccccttgtcatttaatggaatgtcgctcattccctgtatgagacagcgtttgttgaaatctgtctccccatgccgtataaaatatacaatcatcttctatttcctcttcctgttgttgtttacataaaccagatttctttatttgtcgacgacacactgacaacgcctgcctgcaaaagagacatcacatcttccttgtccgacacaagccctcctgcaataaccggaatctgcgaaattcgacaaactcttttcacaaccttcggcatcagtgccggcagtacctcaatgacatccggtcttgcccccttcacatgcttctgaatattctcgtaagccatggaatcgatgacaaataaacgcagcaccgatgtaagtccaatctcgcctgcatgtttgatcaatgcaggttttgtcgaaataataccgtcagcttttgtatatttttttataaaatcaaccgctacatccttggcagaaaggccattgatcaaatccagatgaaccagtgccatctttcctgcctgtttcaccgtatctacaatatccgcgatattgcagatatctccatataaaataaaaacaacctgaatgtcacttttcagacattccttcaggccattatcatcttttatggctgctataaccggagaatcctccagcgcatctttgaactctctgttcattattctatccctcattctgtcatcattcctgtttatgctgtctcagaacaatgctcatccttcctcatcaaaatctataatgccctatgacgatgacacacttcttgctaacgctcattatataatgaaatttcctgcttcgcaagacgaaacaccaaaaaggctgaggcttcacagcgttattttttttacatctcccgtataagccggtactgtacgatccagtgttccctctgtggatgccacacaggctgccacaacaaggtcaccggttgcattggttgctgtatgaatctggtcaataattctgtaaatacctgttacaagaccaataacgtgaactatccattgtctaaagccaatgggcttcctgcttcacagacctcgtgacctactatctccacaggcgtaaattcgggcagtccnnnnnnnnnngttttttgcagcgttaatgtctctatcatgttttgcaccacaaacaggacacgaccattctcttattgataaatcttttgtctctgtattttggtatccgcaaaccgaacataactggctgctggcatagaatgtatctatctttatatattttctaccattccactttgccttatattctaactgtcttgtcaactcataccatgaaacatcacttatagcttttgctaaatgatgatctttcaccatgttctgtatctgcagattttccgaaactatcacttggttttcgctgataatctcatgggatatcttgtgcagatagtcttttctgctatttgttattttttcatggcataatgctatcttttttttgatcttgttgtaattttggcttctcttttctttatgcactaactgtctttgcagctttgccagtttcttttcatatttcctgatggtttttggattttcgtatttctttccctttgaactaactgtctttgcagctttgccagtttcttttcatatttcctgatggtttttggattttcgtatttctttccctttgaagtaatacataaatctttaatgcccagatctattcctgtgttttgatctgtatgtggcagttccacatgttccgtttccaccaaaattgatacataatattttccgcggaacttccataacagtatcttctgtacagatagtcacatcacttaagaaagcggaatcccagtggaaaccaggaccaggtacagcaccgattgtaggaacatcaagatcgaataccatgttcttgatcaggtttgtatcatcaaagtactgatgctggaaacgctgtgtaggaagttcagaatatgtttcccaaccgttagggcagcagccaaatgtctttgctatctgttctttctgctcattagtgggatatattctgtatttatatgcttttaacatcttctgccaccgccttaaccttggttttctatatacctttttagcattttttctgatacatgtgatattgtaataagtatttgtacctgtttttagttttccaggtttccctgccataagtatacaataatatctaacttttgactaccttaacccaccgtctaaagccagtgggattgcggtagccttatttcaaaagccaccttgaggtatttgattggattgacctttgccacaaacagaagcaacggtacatacacaatgagaatgtgtgtaatggctgacaggtaatctgtcaggataaatttgaaaatgttattagcccagcaaaatcgcatggacgatatcatcaaagccgccaacgacagcgaatatcaggaacaattgtttaaagaattccatctttaatctgactgaaaggtcatcctacaaatgaagaaattaataaattgtaaacagttatactcaaaccaatattaacaagaggaatcctgtttacaaaagataaaacagccggtacatgttgatcctaaaatcaatatataccggctaatattttatgcggcagcattcgcaatcttcaaacatcccactctgaatgtacctatgtatatttacctcttctgcagcctattccgcaatcgtatatattctgtcgtaattttcctgactttcatcctcaaaattacaataatgccctttgatatccaaagactgaattttccctgtatcaaccagccgattaaatacataccaggattttccgctgtcttttaagcttacaattgtattataggcatcttccccatcaatcacatactctgtaccatctgtatacttcaatgtgatgttgtcaggaacattctcgatattctcatctgctgtatctgacatagtaagaccaatcggcgacacctctgctttaaccatttttcctgaggatattgcacggtccacatctttctggatagatgcgttatgtttgtcataatgcgtgtttaaatccgttgcagtatcaaaaattgtattattgtaaatgatttttctgagtcgttctttcgaaatcatactgattcaactcctttctttaaaaaatatgtatggtgctgacattagtcatcaccatacatggcttcggatttacgatgcacattgatttcattttcttttgctcgaatgacatccgggtcggattctttgttgtacagaagagtatcaacaagatgccatatgtcatcttcagaaatgttggttttacagtatccatatgtttcaaaatcatatgagagtttcttattgattttgtcatgtgtgatgtattcatctgtttccggcacgtcgggatattttgttatccatttttcatgccatgttttttgaatcttaaaatactgtgaccgaatttctggttttttgcgagccagagcaagaccaaatttttcatcatacatcgtaagtcctttatcttttatatttgcataataaaagatattgcttatctgggacatgatgtaaaacggtagtgcaacttcaatagttgtatctgtaggtttgatgttttcgaacatgttgtgattcaccctttctatgttgtatttcttatatacattataataggctatgatgtagaatcatagcctattaagttataataattcagtttttattcattctattatgccgcctcgactgcacctgctgccacaatattgacgcctgtacctgccacattttcaaggacaacatcaccgatagccaccggtgcctgaattgtcacgccttttaatgctgctacacattcaaaaatcttatccttcggaatatcggactgtgttttaacattgatcatcggagcagcgccgccgctgactctgacagttgtcgtgacgatacgtgtcggattagtgacttcttttctggcataaatatcgccctttttgcaagtgttgcctttgacttctacaacttctttaccattcattgtcactgtgagagcgcatcccaaaggacagccgatacaggttaattctcttgtttccattcgttatgcctcctcaattttgattgtaatatgcttcaaatcagggtaatctgccagtttggatttctgcaggatcacctgctccatttctcccggtgccatgaccggacgtttgcgtttgctgataagttcatcatcaaaataagtcgcaatggcacagtttttataaacatctcccacacggaaacgaactgtcagagtatcttccatttctgtcgggcggatatattttggcactgtgtaacgcacgccatctaccggcaaaatttcaacagtttttgcatcggctgtcttgccctccttaatataagctgcagcattctttccggctgttccggcttcctgggaaacataatccaccaggtcatgcacatgcagcacgttgccgcaggcaaatacgccgtcaatattagtttccagactgtcattaacaatcgggccggatgtaatcgggcttaagtcaacaccggcactcttgctcagttcattttcagggatcagaccacaggacagaagcagtgtatcacattcatagcgttcttccgtgcccggaatcggacgacggtcagggccaacctctgcaattgtaacagcctttacacggtctttgccctcaatatcaacaactgtatgactgagtttcagcggaatatcgaaatcattcaggcactgaacgatatttctctttaatccgccggaataaggcatcagctctgccacaaccttcactttggcaccttccagtgtcatacgccttgccatgatcaggccgatatcaccggaaccaaggataaccacttcacggcccggcatatagccttccatgttcaccagacgctgtgcggtacctgcggagtaaatacctgccggtcgataacccggaatattcaaagcacctcttgaacgttcacgacatcccatggccagaatcacggctttggcctgaagaagaatcatgccttcctcacggttcatggcagtgacaactttttcatgggaaatatccatgaccattgtatttaatttatattcaatctttctctctttgacctgttcgataaatcttgctgcatattcaggtcctgtcagctcttctttaaatgtatgaagaccgaaaccgttgtggatacactggttcagaataccgccaagctgtttgtctctttcaagaatcagaatactttcaataccgttgtctcttgcagcaacagcggctgccagaccagcagggccaccgccaataataatcaaatcatatgctttcatcatgcgccctcctataattccttgttggtaccgataacgatattggaaccaacaccgttctttgtaatgtcaaacatgctcattggcacttcacgctcaagaatttccatcgttctcggtgaacagaagcctgcctggcagcgtcccataccggctcttgtacgacgtttcacaccatcaagggaacgtgcccccagcggacggtgaatggcatccagaatctcaccctccgtgatcatctcacaacggcagataatattgccgtatgcaggctgtttcttaatcagttcatttctttcttccagtgtcagtgtatccggatgaagaatgccttttctgatcgggttgaacttgtcgttaacttcaggattcagcatctctttcaccctgtctgccaccatcactgcaatagccggtgcagatgaaagtcccggagactcaatacctgccacattaataaaccctttggcatcctctgcttcaccaatcacaaaatcatcaccggcttcatgggcacggagacctgcaaaagatgtaatcacctgacgaaggggtacattcttcacactgagagaagcggtacgtccgagggaatccagtccggcctgggttgtattaaccgcttctttatcttccacatctacggcagtcggtccaaccagcagattgccgtgaaccgtcgggctcacaagaacacctttgcccatcttggacggcagctgaaaaattgtatgcgatacatgcttgcctgcatctttgtccagcagcatatattcaccttttcttgctgtaatatgcagcttatgttcgctgaccatattattcagtgtatctgcataaacaccggctgcattgatgacaactttcgctgtttttatctctttttcgccgctgtctgtatgggttactgtcagctcatagcctgactctgctttcttaatatcatccacctgtgtattcaggaaaaattcgacaccgttgctgcatgcattttcagcatagcccatcgtcatatggaaaggacatacaatgccgcctgtcggtgcaaacaatgcacatacaacatcatcactgagattcggttccatagcgatcagtgcctcacggtcaagaatctgaagatccggcacgccattggccttgcctctctccatcagtacttccaatcctttcggatcctggtcttttgtgcatacaaccatagaaccatttctcttaaacggaatatccaactcttttgcaatctgatccatcatggcattgcctttgacattaacctttgcctttaatgtgccgggtacagcatcaaaacccgcatgaataatggcactgttggccttggatgtgccgcagcaaacatcctcctcacgttcaatgacacagacatttaactgatatcttgataactcccttgcgatggcgcttcctgtcacaccggcaccgataatcgctacatcatacataaacccaatctcctttctatttctgcttaacagccaaacgggaaaataaaaagcaagggaaatagagcgattgtctcgctctacttaccttgctctaatctcccggtaatcactttattgatttgctgcctttatgttaccaccctctaagaagaattgcaacctcttttccagaatattatgtataaattttttgttgctttttctccctctttcttatcctaagaatgggtttgttcttgcacaaaacattttcaaataacctctctgtctttcctgctccccttcatcttcttctaagaatgctgtaatcagattctccagattgacctgaatcacgcccatctcccggtcttcatgataataaaattttatttttgcacaatacctagttattccatccttcgtatctccgatataatccggaagtaccaggaagttatagacctcagttttatctgttcttttgagcacagtattttcatatatccgttttatctgttcctgatagaagaactgtttataaatatccatatttcctgggagtttatatccattgtctttccaccccgagtattttgcatctaaaatacagcacaattcctgatcaccggcagacatatcgatgacgatatccggtatgtttttcttctccatatcttcaaatataattctccgattttccagtgtcctgtcttcttttcttttattcactggctcccattcatagatattatacgccggatggttaatatgaagatcctccctacgcaagataaagctatcatagagcacatcatttcctgagaggtgaagttgatttctataaagccatccgatcagccattcaaataccttttcaaatttcactgccgcaatcacaccaacatccttctgttccctactccatggattccttatctcacaccatgaaaccagcgtgtctacacaccaaggatagattggcacaaaattgatatcctccgaacacttttttacttcctgaaaatactgttccaacaacctggcatatttcagcagccgttgctctttctcttcctgagactctccgtttctcacgctcactgatttcggaaggcacaaaaacacttgctcttctacgcgcatcacacctacgaaattccatgcaccattttttatcaaaggctctattgcccactgtctctgctcaaagctgaaagaactatagtgcatgcctttcagtttctcacaaagttcctccggcaccttttccgcatcctgaatatattcaatcggcattgttttcacattcacttctctgggcagcaatggataccattgttccaacactgttcctgtcttttcagttgatccccaccaaaacgccagcggacagttattggaaatattataatccgttgcaaagaaagcaccaaatcccagggaaatatcatgcttatatcccattggcttcatcttgtcattgccattctcactaagtgaacagatataagccccttttttcatcaatgcctgttccaacacatagcgattatatcctgaagtgaacagttcagattctccgtcagaataaccttttcgaaatccaattcctgaacgtcctgaagatgccttgagctcctccagatgcgccatatactgatccacataaggatccccttttacctgcctcggccaaagtatatcataaggctgcggctgacgcatatcatttttatattccctcatcaaatggatttccgcttttatgtgctttggtgcacaaatttcttccagtctctttttcacataaggaagggcgccattatacccggcaatgtaaataatctttaaggtactgcccgggttgggattctctgtctccagccagtgacccacatctttcagcagcgtcattccggtaaaaaggcaatcatccagataaaaatagttcgctacctcacccggtgcacaggtattcactcctgtgtaaccgcaggcttgaagataggactcaaccattggcaccagacgtttctgagaatttcccttcgtctgtatatccagaaattggctttttgaaattgttttctgcggatctgctcccatgatatccacattcgtctctatgtacctttcccattccataagctttgcctggtctacataattttgctctaacagacggtttgtttccgtcagaacgaccattctttcttcttccgggaactgactgatccaccggtccacatgctccgcatcataaacaccggttcccttgcggtaattttttattttctctgcaatttgttcttctaatgtccgaattaatggttcttccatttcagctctccttttcttttgcgtgtcattcgctgacttatttttctaaagcctccagcaatgcagtgcagccttcatagacatccctgtatgtctcctcaaaaccacctgtataccacggatccgcaatagaccttcccggcctgtctgtaaaatccagcaaaagctttacttttccctctttatccggaccggtaatccgcaatgtattcctgatattattactgtctgcacacaacagataatcataatactgataatcctgctttgtcacctggcgggcacgcttaccgctgaaattcgtataggcggtttcaccaatgccgtgtcttctcaattccgcctgagccggcggataaatcgggttgcctttaccgttccatatttcttccgtactggttgctgctgaagcgatctcaaacgcatcagttaaaccgcgtttctccaccatgtcctttaaaacatattcggaaatcggtgaccgacatatattgccgtggcagatgaataaaatctttatcatttctgtataactcctcaaataccgtattatgcaccgatttgcatcgatatacggcatcatttttcatgtgtatttagttttttctgtcacagttttgccggaacagggcaaaatagtgcaagttgaagcaagacgtagtagtagaacagtagtaaacagggagggcaaatactactgcggagatgccggatgcaaatgaaaatggcattttatgaccctcggcacataaacagtttttgcacatcatcttgctgtcctacctcgaattctcaaccaggtcgagattaccacggcctcttaagctgattcttatactttttttggaatcgtttttctgcaatggcatacagttttgctagttcaccagtatttttgtcaatttcataaagaacaatatcagcacactcctctggtgcgaataattgtaaaggattatttcttctcttcatttcattcaagattatttctcgtagttgttctcgacttaatccgagcatatctgaatacttattaatgcgttctgtaatacccggagccattttgatactggaattctcataaggaaagaacccttcagcatatatgtacaaatactccatcttgaatccattagtgagtccgctcaagtcatgtgatactacttcacagagaaggtgaagggcgttttcgatttttccttcttctgcaacaaactctgacatctggaatctgacatttctatacaatccccagtttccttcttctgcatatttcatggatattgtattgaaatgtccccaaatcttatctctgaacttcaaataaggaggggtctgaaccatgtctgttaaattccatatatccaaaccatcaataccgtgagaatgtatatatggaatccattcgtatttcttaacgatggtctcaccgtcagcagtcaatgagaatggtcttctcgtaaatacacgggctagttccgtttcatctgcattttcaaccaatctagaaatcaaatctgctttcttccccgttacttttaagtctctttttttcagttcttctttgataacagaaagtttttccatattaattgcatcaaaaatatcgccaactgtaataaaccccttctgctgcaaactgcgtaaaatgcttgtaacatcttttattccataactgctccaccaaaatctaggatactcatttgcattatcacagtatctcggtgcatatgataataccaacacttcatgtggatacaacccatcgcaagtaggttttttacctctgattcgcttttcaacaggtacaacttcatcttggtatgtcgttataggcgaaaacttcacttcaacttttcctgaggttttcggagtgctagtttcctcgcttttcttcttaaatatgtcaaacagtcccatatttcaatctcctttgagatgctaatcttacaatacgattttaccacatccgtcaatatcaaaatttcattattttgttgtttgctttatgaaccggcaattcatcatacattgcattgaagagtccagtcagatattctttactgtcaacgtcttctactaacaacatctcttttgccccttcatacggtaattcataagtcgcagttgccatataagaaactgcagattttgtcggtttcacaagtaacctgtcatcatatatgcctccgacaattctgccctgataatatatgatatactctcccatcattgcacgataattaatttcttctaaatcagataactgctctaatataaattgtaaatattctttgcttgaagccatatttttgtcctttcaaatgcctgcattttcaaattatactgtgatctcaatttgattatcctcaaccgcaacgatacggctttcgtaatatccatcacccgtagtccgtggtccactaataacctcataaccatccgcatttcttcatcacttaaaggataaagatacattctttcagtctctactctcatgaaaacactcctaaaacatctgtataattcttgcgatttccataactacaatctttagcattattccaccggacattacataaaaccataactcacgcatatgctgcttccatctatttttcatttactttgataacaatttcaaaaatttcctgtcattcatctgctcgttggttaaatatgccccatcataaaacaatgcataagttgtaaccggagtaggtgcattctgcgcttcttctttactctgtaaatgaatagcccggaatgatacgccattttctcttgcaacttcttctacaatcggaacatatttcgcattaaacggacactggctggtataatataaaacatagcccttctcctcgatatggggatatctggcacattccttaaattcaggcaaaggcgcttctgctgcaaatggcaaataccataactgaatcccgttgtccgcttcatcgcaaaccttgaatcccttataccacaggaattttggatctgacaaaaatggttttttctttccggaagataatatacacagcccttttttccccttgttcttactgtcctccatacaggcatccagcaaatctgctccataaccatgtcctttgaaagaaccggctacccacaggcagtcaatatacatatagccatctgcagtaatcggattccatgcattttcagcaggcagatactcaataaagcactttccccgctctgctcttttcagaaaaacaagcccctctctaaattgctcttttaaccattcttttttagatgacacctgaatatcgttgttattggaaatagcacagcatatgtgctctttatctatgttctcgtttgtcactttaatatattccataaatctctccactatttctactttcatagtatcacttcttctatactgtaacgttatgcataattcaactgagcctaattaatgcttttgtaccactcagtaactgcctccaaattctgtaaagatactcgttctgaatcatcgttcaaatcgtttcaccctttcatcttatctgcatttcctgtaaaaaatgatccatatgctcttccagtagctttatcacatggctcttgttttctgttccatcatatatgctgtaaagtaaaaaaataggtccataaaaatcaagtgctgtctgtctggcttttcctgcatctcccagcattcctgaaaacaaagcttccatataagttaatggtccgctcgcaagatactgcttgatcttatcaaatgccgtttctttatactcggctgtaaccttttccagatcaccctccggcatttcatactgctttactctcgcaatatccaattcattcatcttttcaataatactgtccaatatctcctgcttgcttttataatgcttatacaatgcagccttggttactccaagttttgaagcaatatcattcatggatgttcccatatatccactctgtgcaaataactttaaggcttcttccaatattttttcctttgtgttcttttctttgctttccatgtctatctcttaatttaaatctgccatcaagttaccttttggtaactttaattgtatcatctgccttcccctctggcagcaatgtaacaaaataataaataattccaaatacagctatgcttcccatcataatgccgatcatctgatttacacttaccacctttccatgaaataccggattgcaatcaagagtatctcttatcgcttcaaccatttcagccggataatgttttctctccatctccctgaatactccatgaagcatatgattcttaatcaatgaagtggcatatgtactcggaagataagacagtgccttctgaagacctgaaccaaaatttgaaatcggcatataagcaccacatataaaaccatatcctgcgctgacaattgtacctacagccgaaagctgtccctgtgttgtcaacggaaagctaatgatacttgaaagcgtacttccaaacaggacgagcaatatcatatcaaataatacccataatacatctgctgcattcatataccatcccattttaagcagatatcccagacataatacaaacgcaattccattgaccatcaatgaattagctactgttgacagaaaatatccccaataaattttgcccttgctgacaggtgaaacatcaaaatccttccttgttccatttgccttgtcctgcaccatagtcagattcacgcagaatgttacagtaatacagcttactgccataagtgatgctgtcagttgtgctgccacggttccattaataagcttatccgaaatcgtgatcatatccggaattgctgctgtaaaagaatctttgaaaacctttgcaagaaatgtagcatacagaacaatcagaataactggtgtgatcattgctgtaaacaacatacctttatctttaaaaaacaattttctgttcctgttcattaatgccaatactgttctcatcaatgctcacctcctagctttttccctgtgactgcaagaaatacatcatccattccgccttttactacttcataatccatgaatagatcctgatgttctacaataagctccgtagcttctttcgtattttttacttttatctgatatccgtcacgtatttttttatattccctgttcaatgtctttatttcatcctcggaaacaccataaacagacactatatcctgtacataatcatttttaagttcaaacggtgtgccttctgctgcaacacttcctttatcaagaatcacaacatacccggcattgacagcctcttccatataatgtgtagtcagaaatactgtcatattttctgttttctgaagcttctcgataacattccagattaactgtcttgtctgtggatcaagccctgtggtaggctcatcaataaaattgggtagccttctcttatcccttgtaaacactggctctaacgggaaacacatcagtgtattgtgttcatttttgtgagaagtctgttcctttctcatggattagtgttttattctaaccacaacaaccgggagttttttcccggctgttgcagattattttcttattttaattacagattttttagtagattcaaatcttttttattcaacgctttttgcaatctaatgttctctttttccaattgttctttttctcgttttaattcccggacctgttgctccagtagttcgattcggtttttcatcacaatgtccccgatgtatcttttgggatcaatcattccggcctgctgttctaatacccggtccatttcttttctgacggtttcgttcttgtaaaagaatcctctggataaccctgtccgctttactaattttggtacagttaccttttctctgtccgtgagcatttgtcggatttctgtaactgctctgtttatcttttcttcacttgttttccggttacaagctatcatcatatcgtatttgttcatactcttcctcccatccgtccagacattccagaaccatctgcgataacctgtttcttgcttttcttgtgtcatttgccagtatctggttactcatttttctataatattttacgtttttcagacttttgtgtccaagcagccttgctatcgtccagtcatccagatgcatttctacaagctttactccgtagacatgccggtacatgtgcgttccgaatgtaaaataatttccattatcgtccctgagattttcccgataaattgctgttgtaattctcccttggatcagtgagtaggtcatcggttttgtatggtcattttcatttgtaaaaatatatttgcattttccatacctttcttccgtataacggatggcttctctgatcaaagctgccagttcctgactgatcggtttttcatagtaatgtgttttcatctggtagattctgattaatatctcaccgttttgttccatcaggcagtcagtccgcaatgtcagtgtatctgatattcttgttcccagcatctgatgaatcgtcatgactctggctgtctgtatatctacttttgcaaggaattcattaaaacgctttaattctgcatctgagtagactttaaattctgatctgatattgggtgggatgtccctgttcaatatcagatcttttgcctgtggatattggtagatatctgctactatattgaggattgatcgaagccttgttatctctgatcgatacctttttgttcctgtatcctctgttttcatatataccagatattcttcgataatcgttctgtcaaaatccgcgcaggattttacatttttcttatgctcattcagatatctggaaaatctccggatggctgtcagttccttttttacagtctccaggctttctattctcagttgaaaatatactgcttttttaatttcttccttcaactctggctgactgattcctgtaaaagatatcgttttccttggacgtatcaaatcctgcttcacctgtatgtcaagtttttcaattttccagacatcttttgttatttcgtttacatccgcatctcttaagtcggttaaataatcaatcaggcattctatataccccagtgttctggcacgttgcgttcctcttccgccacacttatttttaaatggtgctgtcagggacaatccttgctgcaggagccagattttcatctgctgcatccatttttctttatcccagtccagaaaactctccggccggttgtttttttctttcaacatcctgcataaatgatggtaaaatcttcgttctgtataaaatttttctgctacgaggtttttacctctgtattgcaggaactcccacatttcttcctgcatctgctttgtcggcagaagttccagatcataattggggtttgttcccatacgttctttgctgagatcacttgctttctgatacgaatccagttccttgatataaaatctattttccacgcttgcacctctttattccggaagcaagactgcttccttcttttgcgaaaagttcctgatttgctctggaaattctcttcggcatatagtccacatattgctgtgtcatttcttcataatcatgtcccagataatctctgacactttgaagtggcactccatcttcataaaacatggttgctatcgtatgcctgaaatcatgggatttgaaattatattcctgaaacagctcatgattttcattaaatattttcttcatactccatcgaaaactggagtaatgatatgcttttcccttttgattctggaaaatataatcctcagcaccaatcctgtatttttttatatatactttcatgattttatatagaatttccgggatggggattcgcttatatgtccgcatttttatttgatatacctgtatccaggcgtctctcccctgccagtaataagcattccctttcaggcagcatacttcactgattctcagtcctaacagcatagagtgcagtaaaatcaatctcggcttttccggaaaatcttttaaatgttttaaaatactttcataggtttcctgttctacactccggtcattatgatgcaggatttcctttttcagataatactggtaattaaaaggaacttcttttatgatatttttcgtctgcagatattcataaaactgatagattgctatgataatatcattgaaatagcttgctaccttgtagtcaattatttgaaaatatttctttatttcattttctgacacttgtttcaagttgatttccgttgtttcttccagccagacaacaaatttttgaattcgataaaattcagtatgtattacacttaatgctaagtgtgtgactcccaaacagtattttatatattcttgaacaagttctctgttatctgtcctttctatgctcataaaagaaatcgtttttacaggattagacggattcacccggtattcttccagatacagtctttccataaaccagaccgtggaatcccatgcaatattttttgcatggcagaaaatatattcctgacacgctctaagctcctgttttgcgcatttctttttataatccgtgtccccatagttttcaattttgtcgaactgcttctgtgtaagatatctgagatcttcaatctgttcctgcatgcaaaattcatatacacttttcaatccgtttagatgtctggtgcattctttcatagttattttctgttgcacgatatcttccagaaccgttaaaatctgctgtttgcatatatctgaaccttttaccctgaaatcccagaccagcttactaatatctgtcgtatattcatatcgttttgcaatcgccggattgggatgataccgcaggaacagaatgtcatggagcagctccggatgattctgggcattccactttccttttaaggtctgcgcattttctatgatcagccgcaactttacacgatctattccgagcagataattacgcaccgtcgaatccacataatattctctcagatatttttgatatccggctctcacctgataattgatctctgacaagtgccagatctcattctgaatcaaatatgtttccagactgccttttccacatttttgttcataatattcatctaattcccgttccagtccttcaatcagttgttcccgctctgcattggataggttctgctcttccggcacaaaggcatacaatcttgccggcatttattttcacctcctgctttccaaaaattgattgacattataaagattggaatatcgacggtaaaattcctgacttgctgtccttagcttgtcatctaaaacattcagataccgtatggttgtgtccagatgtttatggcctaatgcctgactgatcatttccagtggccagtccgattcccatctggtatttgcataatatctccgaagcatgtgtggggtgatcttgattccggtctttttctccatcctctcaaacatatcgtaaacactgtctaccttcattggttttcctgtcgtatcccctttgatgttgataaacagatattcctgtttttgcaggatgtcccagtattctccgatgtaataaagcaggaattcaaaggtgtcattgctgagacgtcctcttctttcttctgcattttttgcccttgcatcattctcgttgtcctctcggaaattcaccctgatttcatgggtttcgtagtcgatatcttttgtataatcgattcctaaaatttcaccgatacgaaatccgagttctgatgtcagcagaatcaatacctgatcccggcagtttgtgcaggcttccagaatcgtaatgatttcattcttttcggctgccctcacatcccgttcctcttctttcagataccctttaaaagagcgggaacgcagcgttcttctgactccgatagcatttgctcttgtaataggctggttataagaaagaacggataaataagaaccgttatttctgaccgcttctaaaaaacaataaaacctgaacacttcttttaagtaagcgttacaggttttattctgtggtccattttctaaattgtcagtatgttttccggctttcagccattttagatattctgcgaaataatcatattgtgtttcgtaatccatctcatagatatcttctgctttcttttcgttttccagcagatattcccaataataggcaagggcaaatgcatttctccgtattgtgttcggagaacgattcgccctgacctgatgcattagatatttgcttgggagcaacacgatttccaacgattccatatcccggataaagaaatattttaccgagccttccctctgtgtttccactttgtatcgtttcatgctgctcaccgcctttcctctaacgctatacacagtatacccacttcatgccgaaatagctattcatcaataccaacaatcccaccgaaaacgcccttgaaataccaccaaacttttcgtgcaaaatctgcttttcctgtagcagaaccacgaacggttacaggtagtattccacgcctttccggtttcggataaagtgctggatatccttgatgtcttttgccatcttgcagcttggaagcgcacacatcacttcctcatgatacctgccgccttctcctgcacgctcgtctaaaatggacacgacacaagtatctgtctcggtgcggagcgcccgtccgaatccctgtcttagttttttctgcatgtctggaacaatcactgcctgaatataatctttcaggctggcatattccttcttctgtgcttcgctgatgggatcaggaacagcaaagggcagttttactataatcagcgaagataccatatctccagggaagtctactccttcccaacaggagccggctgcaaaaaggacagcattgtccatctgtttaaatcttgtgatctcttccggtgaatgtctccacacctctatcatcgggaacggaatttcatcccttaacatctggtaaacgtttcccatcaaatgataagatgtgaacagcaccagcgtatgcccgtaagtcgaacagatcagtgaatggatatggcctgctatcatctctgcctcttcctgacttcctcttctgcattttttcaaattcttgggcagatataaaagacagttcttctgatattcaaacggggagtctgccacatattcccggactctccgcactctctgtaaacctgtcattttccgaatgtgggaaaatccctgtccggtttttaaagttccgcttgtaagaatcgctcccattcctctgctccataacatctggtccagatactgtggaatccgtctgctggatgcacacaatataatccggtggtcatggtcctgcttcagatgcagcacatacttcttatcctgatggaaaaagcattccagcacacttttggtttcttccagcttgtttctgatccactttggaatcttcttttctaatttttctatgatcttattcatggtctgtatcccctcatataaatacattgcacactcttctgtcatgtggaattcttcttttatcccatatctggttctgtggttttctcctatgatgtccagcaccatccggatcgtcccggacagttttcttatctccgggccttggtactcattcccaagataaaagcagatttcccggatatcgtcataacagaggctcttcccgaacatctgctttgccgcatccggcagcttatgtgcttcatcgacaatcaatgcccggtagtcttttaataacgggcggtaatcctgcagcctgtgataaccatcagccagcagataattgtgattacagatctgaatgaacatttcatgatctctggaacgctccagatactgctgatacctgcatgagcctcttttcgggcagtctcccgaacagaacttcggtacactcaccatccttctgtcaaacccacttaagttggacacttcgtccatatcataatgttctttcaacgacagcagagcttctttctgcaacgcatttttgtttttttcttcgattgcaacgattcgttgctccaacctctcatcgcagacaaaatgctctttcccttttcgtatcacagctttaataggggcctgaatcgtcccgttctcctgaagaatccgggagagaaaagggatatattctgtaagaattgctttctggagtgtaatgctggaagtggatatcacgaccggacgctgctcataaggggaacatccttctgcaaggagagaatattttctcatcagaacacaggccaccagataggcatacgtcttgccgataccgacacccgcatcacacagtgctatgtttcttcccagcaggttatccagcatttcgtggcataacataatctgttcttcccttactgccattccatgttctggaaacagcacacgaaagattgtatcaatttcacgatgcgctctttttaaatattcttttgtgtaatacataatttgttacctaatatgcgtgctgataccacatcaatacggctgtaaaggatttctccttacagccgcatgtatctgatatcaacgacacattcttccttgatttcttatacttttgttttttggcgttgtatttgtcctcgactcccccattgccttacgggaacattacaggcggatgcttggcattgcaccactcatggattttctaaaggtcttgctgattacaacccaaagtccatcctctgctcactggcagttcctatgtatcattatcccctcgtaagtgatcctcgcaaaagaccgccacggtcctgtttcagttaaagtggattcgctcgaaacaaaaacaccagcaaagaattttttatattctttcctgtcattttcatttgtcctcgcgccttcctaacacgcttctacttacgggaacgtacctgtaatgctggtataggattgtcaaagtacactggcaaaatttacctgcctattaaatagccgatgaaaaatgctgttattattcaattttcgacaaattatttaatttttttcttaaacggtttcttttggtataaacggtctgttctgccattcccataattttggcaatctctcttcctgaatatccccatgtactaagcaaaagtatctctaatgtctgatgttctgtgccctttaataattcatagatccgtcggtctccaatgttgtctaaaagttctcggatatcctgtgcaaaccgtcctctgtccctttgttttatggaatccatatcctgcatcatttcatccagatgttcccggtatctgcgctcttccagaaaatcttccctgtccatctggcgcaacttttggatcttctcttcttccattcccagttcacgcagtttcttttcttcctgttctttccaataattccactttcgttcttcacttgtcttgttataagccatttagctttcctccgatctgatttttggtatagaaatcaaatcggagcatggcggtgaccggatatgtacgttataatgttcgaaaaatgtcgaataaaaaaatgctgcaacctcttcgattacagcacttctttttcccttactcttttgtttttttaaggacttccattgatgcaaatataactcttctccttgtcatgccttactaaaacaccacaaaaagaagtatatagaaaaagactgtcagaactgtgtaatgtaacagtcatctgccagtcacttttcgcataattcgacatttttctacattttgctcaatatctgtctatatctaaataatatcccacctttcgtatactctgaattatctttgcagcctccggttctgtcttttccatttttttgcggagtctgcgtacaaaacaccagatcatgttggcagagtcatctccatatggttctttccataactgttcaaagataatctcatgggtaactacctgtctggaggcatctgccaacagatacaggaatgccttttctcgctcatttagggttgcaagctcatgcttcccccagtaaacagtatgataacggcagtcaattagaagttttcctttccttatgatctcctgcttttctctttttcttccagtgttccatgtgatatcggaacgtctgagtaatgcatacaggtacgtgttgatcaagctgaccgaaggatgtggaaataccaggtctgcaccccattcgatatacttttttaccgcctgaatccccggtatcactacaataatcggagccctgctgtactgccggacctcccaaatcagcctgcccagctttccgttatcatttctcacaagcatcaatactgcgtcatagaccgctatggtatggaatttttcaaacacatccagattaacggtcgtacattcccactcattttttaacccttcacaaagttgactccacttatctacctcatccgcagcaatcaatacttttttcatttgtatcccttttcttatgttacttcatttttaaagcagaaaaggcagtgaaatctctccaccgcctttcctgtttttgatttaattcgttaatttcatttcttcgtttaacgtattctcttccttcatcttccgtaccaattcttgaatctttttataagattcttcgttgattgtatgttccatccgacacgcatcatgatttgcagtttccgaagatactcctattcgtcgtaaaaattcttctaaaagcacatgccttgcatagattttttttgcaatctttcttccttcttctgtcagttcaatgctgccatatcggtcttttattacatatccatctgccagcagtccacgtactgcaactgaaacactcgctttggaatagttcagataatcactaagcatagaattacgaacatatcctttctgacgtttcaatacatacgccgcttccagataatcttctttggattctccaattttcatatactgctttatccccttttggaaagtatttcttctgcattcctgctgttaagaaattctgccgttctccatttcatataccacatctgccacattcattgtggatactctgtgggatactaagacaactgttttcttcttggccgattctttcaatgattttaagataattccctcatttaaagagtcgaggttcgatgtaggctcatcgagcaggatcagggggcattcatggagaaatgctcttgcaattccgattctctgtttttcaccaccggacagcgtatcacccagttctccgacttctgtatcatatcctttcggaagtgtcataatgaaatcatggatagatgctttctttgcggcttccataatctcttctctggatgctcccggctttgcgatggcaatgttgtttgcaatggaatcatggaacaggtgtgtttcctgcgtaacataactttccatatctcttaaatgcttggttggaatcttgcggacatctgtaccgtctaccgatacacttccatcctgcacatcccagaaccgcatcaacagttttaaaagtgtagattttccggaaccgctcgcaccatgaatccctgtgatcttaccaggctgtaatttcagtgaatagttatctaaaataacttcttcaccataagcaaatgttacattctctgcctctgctcctgtaaattcatgttccgtttccacatcacccggaatttcttccacaagcggtgtctcttccagaagagaaagaacacgctcaccacttgccagtgtctggttcaggttattggaaaggcttgataatgctactaccggtccgaaagaacccatcattgcgatggtacaggttaagattccctcgaatcccatcgttcctttgtcatacagccagatggtcagtgccagcattccaaaagatgcaagcaggataaccatgtttgtaaaggaacgctgtgagccttccattttgcttaatgactcctgcattcctgcaagatttttggaacgctcagacatctgctcttttctcttttcaccctgtccgtactggatggtctcgtccaatcctcgtaaagagtcaaggacaaaactgttcagttctccgaagtttgtccgaaattccattcccttctgactgccacgttttccattccacatcgggatagctactccgacaatcagataagctgccagtgcaagcacgcctgctaaccagtgatatcttccgataaaaatcaccataatgatcgaggtcagcgttgcaatcgcaatcggggaaatggtatgtgcatagaacacttccagtaattcgatatcggttgtaataatagaaatcaggtttcccttatcccgtccttccagttttgctggacagagcttccgcagtgctgcaaacactttatgacggatgattgccaacagtttaaatgcgataaaatgattacaatactgttccacataatgcaggattccacgaagcactgcaatgacgatcatgactgtgataatcgtttttactggagtaaataccagccacatattgtccaccggaacaatcattccggctactcctgtcagaagtccatgcacgatgacctgtcctgccagtattgtcaggaagattgcacacaagtaacctaatgttccaaggataatcgctgccagcatgatatggagcaggggttttaccagaccaatcagacttcccatgatctggagggcacttctgcgttttgttatattcgtattttcactcattatgccactcctccttttccatagttttccaataccatctggctttcatacagatgtctgtatgcaccattccgactcatcagttcgtcatgctttccgctttctttgatttctccgtcttttaagaaataaatcttgtcagacttcacgacatttgccagtctgtgggaaatcagaagcaccgtctttgtctttgccagttcgtgaatcacattcatgatcagttcttcactttccacatcgatattggatgcagcttcatcaaaaatataaactgcactgtctgtccgaagcaatgctctggcaatcaccagtctctggcactgaccgccggacaggttgcttgctttttccagcaactgtgtctgcaagccatcctgtgtctgtaagaaccctaagagattcactttctgaagaactgcttccatctcttctttcgttgcgtccggttttgccatcttcagattttcttctactgtacctttgaacaggtagctgttatggcgaaccagaacaaccctctgcatcagattggtttcattcacttcattaagcggtacgccaccgatggtaatttctccgttatatccccggttctttgctgcaaggattccggcaatcgtactcttaccacatccggattcaccaaccagtgatacaaaacttcctgccggaagatttaagcctattccttttaaaatctctctgtcctcttcataagaaaagtgcacatcttttaatgtaacatctaacgcgacctccggcagtgttttttctccggcctgtggttccggcagatctaaaatcttgaaaatcttatcactcgctgccataccattcattgcgatatggaagaatgaaccaagcagtctgagcggcaggaaaaactcgctggcaagcagaacgatacataacgttcctgccacactgatatttccttttaagaattcggacaccgcgactgccataccgatcgcagctccaccataggcaacaatatccatcacgcttgtggaattgagctgcatggtcagcaccttnnnnnnnnnnaatcttacggaaattctgggattccacatccatctcatctgctttctgctggtctgcctgataaatcttcagtgtggtaagtccctgtaaattttcaaggaacgaatctcccagtccagtatagatgctccaatagttatttaataatctcttcgccactttctgtaccaccacgatagaaatcgggatcagtggtacacagatcagcaggatcacactcgctttcaggctcactctgcaaagaatgataaataatgtcagtggtgcaatcaggctgtaaaataattgtggaagatattttccaaagtatgtttccaactgctccacaccctcagttgacacctgtacgacctccgaagaggatacctgctcactgtaggaagctcccagctttaacattttctcataaatcttttcacgcagaatccgctttacatccacacacgccagataggaagaccttgctcccatccgttcacagataaatcgaatcaccacaaccagaactaaaatcagtattgtccgctcaatgatcggtacggttactgcccggtacactacccgttccagtaaatctgcgatagaaaagactgccaacacttgcgacaggagggctgcccactgccacaaaatcgtatacacgatatacttttttgcgtgggacaacagccccaccagtcttgttttaatcatagtttatcttacctttttgtttattttttcgattcttttttactgcatatcaaatgccatactgcaagcaccggatgataaatcagcatccttggtcctgaaaaccgcataacctgcctgatctgttctctcacctctggcttatagcaatgcactttacagtttgcgcaaaatgtcttttctttcataaaaggacacttttcacttcgaagtcttgcataatccaaaagttcctgacagacaggacaaatctgccctgcctgcctgtcttctttcggatgttttttccggcaatacagccggatcatctcttccacgacatgctgttccttctgtcgtttcttttctactttatccatcatattattccacttctgcaccttccggtaattcttctcccacttttaaagttttcactcgaaggaagaagtataacaggtggcatacccaaaccactgcgatacagattcttccgattggtacattcttcatgcagataaagccgattgccatgactaccgttaccattccgataatcttgcattttgttcctattgtcatggctcttttctgaacaaaactgtccagatgtttcttataaagattcgttcctacgaaccagtcgtgcagtttcttagaactctttgcaaagcaaaacagtgttgccatataaaacggaacggttggcaggataggaagtacaattcctatcgtaccaagtcccaggcaaagaaatccaagcacgatccatactacttttaaaggatttttcatcttctttctgttctcctgtgggagttttcctcccctttatttcttgtcgttctgctactatttccttcttacaccgccagcacaaacttccgtccatcaacccttgtcacaccaagctcaatgccatacagttcccggatgctctcttccgtaatcacttcttccggatcaccttccaccagcacttttccatctttcatgccgatgacattatctgaatatgcgattgcctgattgatgtcgtgcagtaccatgatgatggtaattccaaattcctgattgagttttttcaccagttgcaggatctcaatctgataccggatatccaaataggtagtcggctcatcgaggaacagcgtctttgttccctgacaaagtgccattgcaatccatacacgctgacgctgtccaccggaaagtcttgagacttctctgtcacgatattctgtcagattggttacttccaatgcccactggatcatacgctcatcttcggcactgtctccctgcatcattttcttatgtggggttcttccgaatgccaccagattctcaacggtgatatcgtctgatgcactgttatactgctgaacaatcgcaacctttctggcaaattcttttaaattcaggttctggatattctttcctttgaggaaaatatttccctttctcggatataagtttttcgtcatcagggaaaacaatgtagattttccacatccgtttgctcccataatcgttgtgattttaccttcttcaatcttcagggatacgccctttaagactttattttttccataggaaaagtgcagatctctaacttccatcgcaggcttgtctgcccacttatccgcttttttcactttctttgctgcttcattctctgtagaagtcaaatccatattcttttctttacttcgcatacttcttagacctccttaacagaatgatgaagaatgggcctccgaccacactcataatgatggatgcggatacctcatacggagcagctatcgttcttccgatggtatctgccagcaggaacgtaaacgctccgaacaaagcactaaatggaactaatgccttgtggtcgcttcctactaaaattcttccgatatgcggaacaatcagtcctaagaaactaatcactccggctactgctgtggaaatacttgcaagcaatactgctatcagtgaaatcacgatacgcattgcattgacattgattccaaggcttcgtgctgtcttatcttccagtgctaacagattacacatcttcgtcataatcagtgccagaaccagtccgacaattacatacggtactaaggttttcacatcatcccaagttttcattgtgatattaccattgacgatggctgccacgccagacatgtttccgccattcattgaattcaacgcactggataatccggtgaacattgcatcgactgccacaccgacaaggataattctcagaggacttaatccccctttccatgacaggctgtaaactaagacaaatgcaatcacaccaccaagaaatgcaaataatggagtgaagaaaaataaagtcggtgcaaatgcggtaatgagtaccgccgcaaaacttgctccactggaaataccgatgattcccggatcggcaagtggattttttaataccgcctgaaataacacacccgataccgctatcgcagctccggctaacatggagattacaattcgtgggaatcgtaagtcatagattgttgctacgtcttcattgtactttacaaataatcctttcagtagttccgggaagctgactttcaggcttccgatattcactgccgcaaagaataatgcaaccagcaatacgatcattacaataaaggaaattgctgcttttgctgttttccgatgctttcttgctttatcctgaccggagaggctctggacttccatttcggaagtctcagaagtattttttaattctgtctctttcatctgtcctctcctttctacttgctctgctgttcgttgtatttttcagttgcgtcagaatcctttgctttcttctgtgcattatcactggtttcttttgcttttgctgaatcttcatcactttccggataaaggattggctgtaattcttccagtgcctgtggatacttaaacgtagcactcatgccgaaatattcataagtcagatcataaactctgccgttcttcaccgcatcgaaatgctgccagatgtcattctccgagaagtctttattgaacatctctaccacctgatccggcagtgcatgtgcggcacgtaaaataatatccggctctttggttttcatgtcctcagtatttacggtcaaaaattcctgatcggtgtcagagtatacattctctccacctgccagttccaccagacttcctacataggaattcggtgttgcgataatataagaccccggaagtcccatcaggatcattaccttcggatgatcttttccttcattctttttcttataatcatcatagaattctgtaaactcgtccaccagtttctgtgcctgatcttctctgtcgaaaatctcacctaactcctgaatggaacggtacatacccggcacacttctaagattcaaaaacgcccagtctgtatcgattgcttcatatttcggctgcagatcactctgcaatgacaccggacttaaaatccagtctggattaagtgaggatacaatctccatatccggactcatggctgttcccacggtttccacatctttgtatctgtctggaattgtggacacggtactgctgcaaacaccaaccagatccagttccagcttgtcacagatatctgcggttgccggagaagtcgctatgattcttgggctttctttcattgcctgtacttttttcttggctgcttctacggctgccttttcttccggatcgtcaatctctaaaagagacttggcatcttcatcggaagagtccttgtcagatttactgtcagaagtctttttatcagccgtcttactgctgtccgtctcatctgtactgctctctgtctgcgtagcagaatcactgcttttctttccctgactctggtctacacaacctgccagagaaaaaatcatggtcattgcaaggagaacagccgatgcttttttcaaacgcctattcatcatcgtcctctgcacctccccaacgtttccagttcttacggaagaaataaatcactccggatactgctccaagcagaatcagacctgttactacaactgccaatgcaatctggaaaatccggttgccggaagaagtatttccgctatcggaatcgctgtcacttgttccatctttcgcagtagaaagacttaatccttctgaagaatttactggattttctgtatccagtgaagaagaatcactgctcggttttgctgcttctgtaatactactttccagtttctttgatgagctggaagaactgcttttatcagatgagccggaactctgaagagaagaattaccagaacccaaactgctgtttccacttgaagtagaacctgaattatctactgaaccagaaccaccggactctgccgctgttccattcgagctttctgttaccatagttgcgttcatatcggtattgttaccctcgctgtagtcactcggatacagatagaaaataacatttcttcccatcggctctacatacatctcgcctctgacaatacaattttcacttggcacacgcatacacacatcggctgttgtaccattactgtctgaaccatttcctgtaataccgatttctgatggtgtagaccagccggaatcacctacattctgtacctgaaagctatgtccactggtgtagtccatcagactcatgcggatggtcagataataagctccatcgtctgttacttccaagataccattgctgtatacacaaccttccaccatgccctgtcctgttgcataggaactctctccaccggaatcttcgattactccggtaaccgggtgtgcataacatctgttgattgcacaactatacactgtcccgcttgcggcgtaagccttaacagcaggaaagcctgccattaaagtaatggcaagcacacaagtcataatggcagacaatattttgttttttttcgctgctaatttcattccttatctcctgttaaatgaatttggcagactcccagtcccgaaggaatgggagggttcgtctgccaaatcactacttattattttacgtttgcttttttctttctgttgtactccatgattcctgccagtaaagcgactcctccgagaagaaggatagctgcccacagggtattgttctgtacaacatcaccagtcttaacgttggatgctgatttcaggctggaacctgatccaaggctggatgttccactcttcagacttgaagaaccacttccaagtgaggaagaaccaagtttgctgcttccaagagaactgcttccaagggtattatttccaagtgagctgtttccaatagaagaattactgttgttatttccgttggaattactattattgttgtcgttcttatcaaagtctggatcatcggatgttgttgcttttaatgagctccaatccagtttcaggaatactggctgtgtacctgtgccagaactgatagcgtccataatcggaacgaatacctgtaacggaacatatccatcatccagagcttccggaataagctcgaatgttacttcatctggatagtttgttccgtactggtcagaaaccagtgagccatcgctgttcttctgatagctgtcaactgtaacatcagcaagtgttccctgcggattaccatacttatcaggtgtataacctgttttgaagtatttaagctggcttaaatatccaagtttctgtcctactgtcaatccgttgaagttcagagtaatgtaatatttgccattctttactgtcagcttaattgtatggttgattgcttcatttgacatagaataagtattcttgtctactttcaccattgttccatagatagagtaaactccatcagcaaggttcttgatatccagttttccatcactcttctttgctaactgctggattgcttctgtcagttttgtcacctgatcatctaccagtttctgtgatgcagaatcattatccattacattctgagcacgacctactgcactctgtaatgttgcaagagagctttctgtataaatgtctgtctggcttaaatatgtctttgcttctgcaatcttgctttccagtttgctcttatctacaacttctttttctaccagtccgtttaatgcagttgtcagagatttctctgctgctgcaacttctaattctgttgcttttggatttgctgcaacattctcagccagtgtaattgctgtattcaggactgtcaggctgttactttcgtaaacatctgtttttgcaacttcagcttttgctttttcaatcagggcatttaagtttgtcttatcaacaactcttaagctgtcaagtgctgtctgaagtgctgtaacctgtgcttgaacttctgccttggtagcatcttcttttgctgctactgcctgtgcatttgtgattgctgtctgtaatgcttctaatgttgcagaagtataaacaacatctgtacggtttgcttctgctgttgctttttcaatcaaagcattcagttctgtcttgtctacgatctgagtttctactgcatctacggctgcctgtaaagctgtcacctgcagatcaatttctttctgtgtagaattcatatcattgtaaacatcctgagctgtcatgtaagccgcatttaaagcgttccagtactcgtcagcaacatccccttgctgcataccggatacctgattcagaagtgcttcgattacgctgttgtctctctctactcctgtctcctgtttgatgtttgcccagtcgatagaaactctggcaacctttgtaccctgtccttcaccgatgctttccataaccggaacataaacctctacatagaacaggttatcgttcagttcaatcgggattgataatttcttcggataccagtttccttctgtattcttgtcgtaatactcagagttcttattattaaatgaatcgtaaacatctgtgtactcttctaatactgttgcatcggaagcttcatattttaccggataattatatttgttgtattcaaccgtatccatatctacttttttcagtttatacagatatcctgtcattccggcaaactgcatagactggaagttcatctccagtgtcacttcgcctttacccgtaactcttacaattccggtctgaaccatggaagcatttcccatagaatcttcatcggatgttgcattgagcattttgatcggtacggaatatgtaccttcaaaaatctgcggataatctttgaaaagatcactctgtttgttcttaacaacaagtgcttcataagaagaggtcagcagttttgtctgcttttctacttctgcttttgttgcattgacatcagcggatactttctgagcagatttgattgctgcctggaaactattccaactgttgtctgtataagtaccgtcatttttcttggtcagtgcattttcgatatagccatttaattctgacttatctactgcatcatccagacgaacaagtgcttttactgctttatccagcttgtcaacctgttctttcatttcatctgctgtcgcatcagattttgccaatacttcttcagcttccttgattgcagacttcaaattctcatagctgtcttttgtataatttgcttctgcataattatttttcgcatcggaaactgcctgatccagttctgctcttgcttttacttcttctttcattacaagacctgctgttgctgtatccagagctgtctctgctgctgtgatttctgactggaatgccaccttatctgcctgaacgctttctgctgtagcaatcgcatctgttaatgctgcaaaagaatcgcttgtataatttttctcttctaatacttttgcatcattcagttttgattccagatcggattttttaatttcctgttttactgcagattttaaatcaagatttaacaggagttctgcttctccgctttctgttgttacttttactttatggttttctacatttgcaggaagtttcactacaagtctgcctgcgtctgtatctgcatccgcatatccggcacccttgcgatactgcataccggtaattccgtccacgtacagataagcagttacattgccgtctttatctgtatataaacgagcagattttaatcctgcattcaaatcacttgctgttccatcctgattggtaagtgttgcctgtacttcgtaaacacctttttccatggaaacggctgttgacatcggtacaagtgcatctactgctgactgaaggtctgcggatgcctgatctgcattttcttctgttacctttccttcctgagcagtaatcactgcctgaaggtctgcccagctttctgctgtataatctgcttcatttaatgctttggcatttttcaggactttattgtatttgtcaagtccagttgcctcttttaatccgctgattgcatcagaaatttctttatctaatgctacgatttcagaatcgtttgcagaagttgttccgtcgattaccttctgagcttttgctactgcgtcagataatactttgtaagattcctctgtataattgtcggctgtatatttagatgctttatcaactgctacaactaaaacagatttatcgtgggttggctcattaatttctgccacaggtgttaaaccagataaagtcataaatgcagttctgcatccttcaccagatccaggaactttatgctgaagttcatccatgataggaacaaagaagttcaaatataccccatcatctctgtctgctgattctggaaattcaaaacctacgctcttcggataatataagtcatattcttccgcataggaatccatatctgtgcttcccgaatcatttaggtagtaactataataatcaagcggtgtatattcacttaatatcggaagtccgttttcttctgtctgctcattatttgcccagaatattccatttgtataaccatatctgcccgtaatcacaattccttgtgtatcaaaatagatatgtttctttccattctctactaccaaacgagctgaatcatttacaaccgcagaattgctcatagacaatctatccggctgatcctgctgccacatagtaacattaacattatatgttccgtcctggatttctgaaatatctactttatccgctttttgtgtaatggcgattgtattataaacacgagtagtgcctgttataaccagttcatcgccctccatgtgaatacttccatcatcatttttataggaagatgaatcaaaatactctatcggattaaacatttcatttactggataataccattgaacttctattttgctcgtatcccagtctttcggaatttttactcttaattctactgctctcgatggaataacctgcgagtcattcatttttaatgacaaattatagatcaatgcttttgaagcgtttcctgctaataaagaataatatttgttatattcactatcttcatctgaggtttcctgtaaaagttctgctccaaattttgctttactattaactgtatagttatctgttacaagtgtaacatcaccatctgtcaattcgagtttttctttcggtgttgttcttactcgcaattctccatagtaggtaccatcttctgtttgtatctcaacctgttttccaaaaatagcttcttctaagttttcgtattcaatggaaaattttccatcttccaaaatattgtctgaataaacagaaatatacttattcttttttacttctctcgaatacgcatacatatattggcgatatgaagaagttgaaggataagtacactcgcctaaatccttaatttcttcaagtactcttattgaatcaatgctacttgtctctgctgtaacagtaacttttccattctcaatttttgcttcacaagtaccactaaacaaatcatttgcagttttttcttctgctacaaatcctgtgaaatccggtgaatctccaacactggttacaactttagaaagctccaatccaatatttttataattttcttcgttaatctctttagcaactactgcattatttacatcaaatgtaaattttccgtttacaattccgtacatatagctttccaagtcatcatctgttcttccataactatagaaagctttagtatacatcgttccttccagtgtatccacatcaaaagaataccacgacacacccgttgttgctttttcaacagaataattttgaatgtatttatcattccactcttcattaatttgtccttgttccttcaaatattccgttgcctctgatggattttcctcattattagcaatatatttttctggaatattaaaagttcccataggtgcattcgaaggtgctatatcatctgaaattacacccggttttgagaactgcaaaatatcaattttttcataattttcaatctgtaaggttacatgatatgttccattatcattcttttttactagtgcaacattatccatgtaatcctgaactgtacccgaataaggctcctccgtaagcagttttccagaaggtccataaaaagtcagtggaacaacatattcattttggttatctaactctgtatttgcggtatttgtttctttctgttcaccagcaaacgcttgtatattcataccgccaagtaacatacttgtactcaatacaaaggctaatatctttttaatttttttcatttttcctccgtatcaattaaaacaagctgctgcatttttgggtacagcagcttgctttacatacatatttacttattttattttgctgtgatgtctgtaagtttcaaatatcctgttgcgttcatcggcatacttccaacgtatgttgtgaatttaccagtaattacacagccttcataaattgtagatgcatctaaacctgtgaatgtgaagtagtaatctgttacgccattagttgtagtctgtttcggagtaactgtttttccattaactaccatttttcctaaatgtccagtcagacctaaatatgtaatctcatgagtatgaacaacaagtgttgcctcatcatctgcaatcgtaatttctgcacgcatatcattgagtgcagcatctcccatagatgttgttgtacaagctgagttcttataaagattctgctttgctgtgtacttaccatctgctaatgaatctgcagcaaacgctgtaactcccattgccattaccattgttgctgctaacagtgtagcaactaatttcttgatctttctcataactgtaatcctccttttctcatcttggtattagcttttttctaataaatttttagttatgatgtttagagttctacgagaatatttccggttacccgtatctaactccttgtctgaaagatatcataatttgccattcaatgtcaacactattttttacaggtttgttgcctgaatagcaacaaataagccgctatttcctttgattttgttgctattcagacaacaataggcgtaaaagtgccgttattgatagtgttttatcaacaacggcactttattgaatttttttcttattttgttacatgatatgcgtaaatgagaatttttctcacttcttatttatacccagaaatataatagtgcagtgctttccggcatgtgcattggtcctacgctgcaggtaacggtaactggtacaattcccatcgtgccaatccccgtccatcggtggattctgcacgcttccatcgggattttcactatattattctctattcttgcttcttccaaaacttcattatgctcatacttcaatgttttcagttttccagccatcatttcaccactcactctggagtgtgctgccatctctttcagctttaattccagatagctttctccattctcctgaacgatttcggctatttcttcaaatcctctcatcgccatagagtctcttccctgcccctgctttttattcatccggtaaagccggaacactaccggatgcctttcacatttctgcagattgtgctgtatctcctgatccagttcattctcttttttcttgtatactgattttttctctgtataggcgttaatcatcagttccagcatgtgggtgtcgatattctccaccataacatccagtgattcctcgatttcttccggttttgcaccgatttcttccagatatttttcaagattctcatacagcttggtatatctttccagccattcttcacctgctgcggtaaattccagtgattctgtcaggattcctctttctatgcagttcttaaaataacggtttaccgttgatcgattcacgccataagattctgcgataattccctgagctccacgtttcttttctactcttgacagaccttgtaaatattgcagttgcagcatcgtaggtctgttctgtctctttagatgttcacctttttccattttcctgttcctctcttcgtcaccatacatgaatattcaattcccgataatcgattggcaatggcttctgttcaaagcgtgtaatcgcaatgattgccactgcttctgtaatcgggattcctgtattcgcagtataagtacagatgtctgtcggtaactgataaacacctttttcttctttcgcctgtatccattcatcatctcttctgtaccatacatagccgatggattcgtctttttttgtcttgagcaggaagcagttctgtgactttttcactcttaatatgacagagtgttccagtttcccgtactctggtgcaaggaaccttggattgcgtcgttccggttcatacagtccgaatgccatcgggaactcaccatcctcataaaaggtatacaagtccatatcgtcataaactctgtcgtatacgtcaccgtactgcagaaagttttcaattccttttaacccttccggactgatataatgttccactctacaggcatcttcctgcgccctctgctgatccattccacttaccatctgaaagaactgtgtcagtttctcatggcgtgcaaggcactccataccttccagttttcccttatcgctcagttccagatgtccgttttccggctcacacaaaaatccttttttcaccagactccgcaccaggcctgccgcttcatatccggttatgttcacttctctggcatactctttcgatgtgatctgtctgccctgcctccatgcccggtagacatattccagaagatcttcttccagttcgcctctggcttttgtcacatcaatatttctgttttcaatctttcttcccatgttacctttcctacctgtcttttttaatattcatccgctacacgatatccggtattttctgcaaaagccttccatccagtaagcatatcgtttttttcttagaacctttctttttctctgcgacaaaccccagattacaggtgaagtgtatttcacccaaccactgctgttcgtactctatgtgaaatgctgtggcaggaattttgatgctgtgatcgttttcttctgccttcttccagattccatgcatgttctgataccagattgtcctgtcatcctcattttctggatgctccgttagttccaaccaaatttcccaaggttctatgtgcagccagccatccctttcaaaccgcatatcttcaatagctgcttttctctcttttccgatctctgtggtgtaaaaggaataccacatctgatactttcccggtttcaacttcttccaaagcgtgtggcagtctacacttttcggaatggaacttcttccaccgtcattgataaatttccataaattgtcgattttgtccggatcggatacctcacacgccatgagtctgccgtccctgtccgctgtcttttcattgactccgctcattttcaagaactgattccagccttcggctgcccgctgcagttgtctcgcatactccgttccgctttctgtcagtgccggaatcttcgcatcactgtccgtttccagaaaaccttcttcttgcagtttcttaatgttcgttttccagtgatactcggtcaggtcatagtctaatacgatgattcttttgatctgcttatcatcctcctgccttttccgcatctggaaaatcgtccgcagaatatctttttgcatgtattcttttgccactttctttgtttccattactttttttcctctgtttcttgtttcccgattacgctttggttagtcggttcaaaccatgtatttttaattatattgtccttttttcaggtttgtcaatgcattttccgctacaacattataattccatataaaaatatccaaaaatatgtttttatttcttttttcacatacttttggatattttcatagttaatttcctgtttcctttaattttgactcatccgtagtctgtgtgtcaacgcagactgcatggatggcaagccgcttgctgtatccattccctgtacaggtagaaagtgtcagtatcttgttactggtctgcggatttactcctgtatcaacatcggaatcttttatcatctgatcgataaatttctgatactcttcgcccggctggtatcctactttatacacatcaccgccattgaccgcatcttcataagagaagattcgataacggtaggcggttgtctcagaatatacagtgaagtattgattctttttccagaatccgtcatccttatattttttcaggctcccgaacatgcttccgtcattcatattgtgaccgtagatgatgttgtaataatccgaaaaatcagatttgttaagaccttccaaaaagatacaccctgcgatgtggctgttgccatgcaggtcggttctcagatatttctcattgtcacctgaatacagaattggataattgatgccaagttcgtcctgattatcaaaccgtatccatccgataacatctggattctcggctttcagtttgtcaaactctacttttacgtctgttgcccaccagtcttttttcttctgttttccatcatctggttcggactcatcatttacatactcttcggcaagtttgtcataatctctggcagatttccatcggtcgatgtatgggggcaggatatgcataagtgctaccccgattaaaaccactgccagaatgatccatatcagccatcggtatgagctttttttcttcatgttgtctctcccatttttcctgttagttctctcgaaccactatcgtcattatggaatgtgtggtcagaattgtcaatctttttcttctggcgtactgtctatttcctgtccgtctgcccctatctgtctatctgctcctgtttctccatctgcttctgcctgtccgtctacgaggtcgtagctcatatcgagtaaatccagaacttttgaatcgctgacagaaccatccagcggaactgccagccagtgcttcttgcccatgtactttgccggagcaaggtgatacatttcgatgtagttgcctatcatgtccggctctgcctgaacctccatgaaagttgttctttcggctggttggtaaaagatggcataaggtgcggcggttcttgggtttttgaagatggtgacggggtatccggatttgttgatggtgtctggatgggtggggtattgcttttggatgtatgtgaatatttcttgttggttcatgtgggatcccttctttttctcataatgaatggatgacctctgccatccattatcatttattataacttttctgattcacttattacaatagcttttttaacaagttttcttgtcttggagtacaaaagaaagctaccagtttttttcctctgatagctttccattcattcttattctgttgggaacatcgctgcttccagcttattcatctctgtatccgaaagaccatattttcctgaattatctttttccactgatacttttacagtaacagttttcccataactgttcttttcaagactcttctggacgctttctgttaaaacagatgcaaatacacccggatctgtttctttcattccctgtgcaatcttttccttgcttacctctgtagagctttgttgcaatgtctgaaatacattggatggttcaacttgtacacttactgtatagactccatcctcttctttcacatcctgtactttgtattttgccagtttctttacttctgccagtttttccgcataatcagcaattcctttgtccgtaatgttatcagaatcatcaaattgctgttggatgctctcattaaaatcctcttcgatttctttcttggcatctttttccgagatttctaacagattcgcatagtccttatattctccatgatagtatgcatcaagagaactttggacataggatttggcatcgaagtctggttgtttggagcaagctgataacaatatacatactataattcctatacttatgcacaaaacacaattcttcttttgcatattctctccttcgttttttattgaacggctaaaagtaattgattatattgatttaataaaatatcatcatcaaactgaatttttccgttttgcacattccacatatttttattttctgaaagaaattccaaaacattttgctgggattgaatcaaattcactatatcgtcaatattttttttaatatcatcaaccgaactttcttctcccaccatttctttatataaatcaatataatacgaatcatcaacattctttaaataagacataaccgtatcgtcttttgacaatattatcatcgtttcttttgaagcactgagtttatcttgtgtattttttaaaattttccttgtttttacaaaatcgggaccatcattctgataattttctgcagtaagagcatttggtattacttcatcatttaaagcctctgaaattgttagcatcgtatttaaattatctgccatatagttttttatggctttctcaattttggcataatctcctgtagttactgtagcttttaattttttgcttattttgtctacatctatttgttcaaaatctaccatttctttttgaatttcatcaatttcttttcgaagacttttctcctgctgtaaatcttttatcacaaaaaatgttattgtagctactataaccagaaccacaactacaattactattataatttttcgtctcatattttcgaggcattgtaattattaacaatgcctctcacctccactgactaatttatacttttaaatttgattctatcggaagatttatcagcttgcaatattgaaatatatcctcacaaaactgtttataatctatttttgcttttcgagatatcgtttttatggatgctaatatattttttactatcataatctgtttatccgttatatcagcttttaagtattcatcataatcaatccagagactaaccgatgcaaaaccatattttatatcacacttcttttcttgtttaaaaaggccctgttctataatatctttaggtgctataattggtgttataccaactatatctacaagatcactgtactgcttattttcaacatgttttgatatacctctgcacatgctgtagatttcatcgataaccccatattgttttgtaaaatatgatggcgaattaatattcaattccatttcttataacctccttctatattcattaccaactacctaaacaatttcattaattaaacttttatttattatttcatcaccatcccttactttttaataatggtggaaattctccatactttgattcataatatttgttcatatcatattgccacatatgaatatctcgcttacttccactttctataactttcatcaccgcattattttcatttagatacttttgagaatatcttttttcaggattcaatgtttcaccaaattttaatatttcattagtatctttatccactaatgcatatccataatttgttcttgtatcttccaaagagtttccatgattatgactagcacttgttttcttagatggtatgccaacctcttcatttgatgcaaactgtccatttttcctatgccatctaccattattatctttatagtatcccgatgttgcttcagcattattttcagcggtattcgtagtagctgtttttacattatttccttgttttgatgctgtagtcgacttagtagtattattccccgcagccactgactcaatattattgtccgatatagaagcggaattatttcttgcggtaacctttgaagcggaagattgatctgtttgtgttaataaaggtgcttcattttcacttgtataatccagtttttttgtagccatttcagtgatatgccccggcttagttgaactagattttccttttaccaagtccttcactgcactaagtgctttaccggcgccataagtaagaccacccaaaacacctccagatattgctcctgttaatccgcctgttaaggtatcttttgcaacttgcttcaaactatttcctgacaatccagaacttattgctccataagaagcaccaccaattgcacctgctacagctcctgaaaccatcgcagttcctaatccacccattgctggcaatgctgccagaactgctccagttgctaaaccgcctgttgccgcaaccacaacaccggacactaccattgctgttacaccaatcgctacatttttccagtttactttgcccaactgatctgtaatacgattcgttgtggtacacatgtggcgtactacttcagaacgaatttctgatgttcgttctgaaacataggatttaaaagatgtataagtttttccaattttctgaacaccattacttaccgaacggacaaaactgctacctcttgatacaacttttcggtatgaattcgtcacgctactccgcacagattgatatgtcttttttggatgtgtaaccgcattttttacagtttttgctgcaccctttactgcattaacaatagtttttgccgctttcttagctgtatttactactgttttgactaccttttttgcagtattaacgattttcttgccgacactcttgactgcttttgctgcttttttagctgtactcttaatcctgctccataatgaatgtcctgttggatcactgtaattcaacggattattggtcgtatagtcatagcgatttctggttaatggattttctgtcgttccaaggtcactatcttcagttgtaaaggttccgttctctgcgtcatagtatcttgcccgcagatactgaagtcctgtttttacatttgtggactccccattgtaaccgtagtaattgacaccgtctgctgttcctgatgtaaggttaccgtatgaatcatactgataactgttcgtcagattagctgtttcggtcaggattccggtcacgctgtttcttccgtcatataaataataactgctttcttccgatttatcaacgcttacccgttctccgattccactttctccataagtataagcctgacgtactttctcgtctgctccatactctgcaaggacttctgtattctcgcgattgatatcgttgatatactctgtcagtgtgtatcctttggcattggaaccgccttttaccagagaggcaagctgctctttcgggctgtttccatcttcggtacgctggttcgccgggatcaggacttcatcgccatagcagtcttcccatttataggtgttatcaagttcgaatacccggttgttatctccatcgtacatggctgccatcaggactgttccaccctgttttactactgccaaacgattctctgctgtgtattgttttttgtcaagcacttttccctaaaaaaagcgtcagaattccctgtttttagcgagggattttccctactttagggtttgtggtgcaaaacatgatagagacattaacgctgcaaaaaatatactggcggagggattacgacaaatagcataagaagaataactatatagggcagggactgcccgaatttacgcctgtggagatagtaggtcacgaggtctgtgaagcaggaagcccattggctttagacaatgggtaattgcacctgccaaagcaaacatcataggctctgtacagcccaaagctggggaagcttccttgtccaacagttctctgaaaatagtcttactcatactcatttccttcctttcttttccgtcacatttttaccgtcacgtttttaattgaatttatcattattgctatatctcataatacatgaggtatatatctaactaaatctgtattgtttctagttgaggatattcctttgtcaaaaattccctgtttttacatagttcttaatctgttccacgctcttcccacaaatcctatatttgcatcgggataaatcagaatctacctaagacgcttcttaatgaataaccttctgttcttttacaatatcccacaggattgcatccactttgttatgtaaaacatcatgctgcaggcgataaagattttccagcgtaaccttcaaatcattatgaacaaagccttctacatttgtagcacggatgccttcctttgccatcatcatagcctgcaaagaaccaaacagggcaacatacattcttgtagcgcaggaaggttttgcaccatcacatactacgccggccatctgaacctgtgctgtacacagcatatcattgatctgctgaggagtcaggccatggagaaatgcgacaccggcagccgctgcaggtgcagctgttgttgcacaggagcaggtaggaggcatataaacatattctttagaagcatatttcataaaggtattcatcagcaaacgacgaggtagatagggcaggggtggaagggcagtaatgtccggagctgactgttactaatcggtcgagggcttgaccaaaatggttctaaaaaatgtgtttagttgatatgcagttttgaaggtgcaaacctttcaactttcctcgatagctcaatggtagagcactcggctgttaaccgagttgttgcaggttcgagccccgctcggggagttgatggcctcgtggtcaagcggttaagacaccgccctttcacggcggtaacacgggttcgaatcccgtcgaggtcacgtaccaatttcttgcctctccatgtcagcttatattccagcaattcccgaaactttccgtaactgttatccatgacactttttccaaaatgcatacactggctcattgctttcatatcaatatcttctactgcaacaacatcatatgcctctgccatttcataactcagcttatgtaagaaatctttcctctggtttcggattttttcgtgacataatgcaacacgttttttctgtcggtaataattattgcttcctttgaagtcgtaacaaggtagccgtatcggaaggtgcggctggatcacctcctttctaaggaaaaagaagtagggattgttttgttgttgagtattcaaaggaagcaggcgactgctgaaatggatatgaacttactggtggcgatgcgcttaagggagacacccgttcccatcccgaacacgacggttaagacttaagcggccgatggtactttgctggagacggcacgggagagatcccgaacacgacggttaagacttaagcggccgatggtactttgctggagacggcacgggagagcaggtggctgccagtgtgcatgaaagcaatgagccgtgcatggacggcggaagattgtgtatgtgcttgcacagatacacaaagattccggcggacatatagggcgaagcccatgactgagatgaagcggagcggaatcgaagtgggcacggcgaatttatatatattatatagaaggacatggctgagaggcagcacgtcagggacagagataacaatgtaaagtcccggcggatgggtccgaatcccatggatgttcatcgacttgcataatactttccggatggttccatacttattgttacagatttcaggcaatatttttctgcaatttcacgatgttttttcatacggatccatttcaacttcggtagttttatccgatgatcttctacctgaatatttccattgaccacatttgtcgtataagatgaatatagcttaccgttttcgtatatatccaaacagagaacaggaagtcctgctcgccaaaacatttggctgctgttgttttttatataatcagatgttgaatgataagatacgggaatatgaagcaatgaaaaaaatgctgcgaaatacaccggcggtgtataaaaaagcatatccatttttgaaagaagtggattccctggcacttgcaaatgtgcagatgcatctggaaaaggcaatacggatccatttcaacttcggtagttttatccgatgatcttctacctgaatatttccattgaccacatttgtcgtataactttttcggctcctgtgttttgatttgatttttggaaagccaatctttggattcctgaaaaaattcttatatgccttttccagatgcatctgcacatttgcaagtgccacatataaatgtaacggacaatgacgatatggaacagtgggatgcggtaattatgggaaacgatgaactattagagaaatatatgtcagggaaaccgtttaaaatgtcagaactggaacaggaagaaaacaggagattccaaaacggaacgttatttcccgtttatcacggaagcgctaaaaacaatctggggattcggcagcttatagaagtaattgccagtaaattttattcatcaacgcctgaaggtcaatctgaactatgcgggcaggtttttaagattgaatattcagagaaaaggcggcgttttgtttatgtgcgtatatatagcggaacattgcatttgagggatgttattaccatctctttcagctttaattccagatagctttctccattctcctgaacgatttcggctatttcttcaaatcctctcatcgccatagagtctcttccctgcccctgctttttattcatccggtaaagccggaacactaccggatgcctttcacatttctgcagattgtgctgtatctcctgatccagttcattctcttttttcttgtatactgattttttgatttctccaccgtcaaagcagagtgcattattggctttacctctgtcataccagctgccacactgataccccttaggcttattcctgcaccgcaggcgtctattgctgcacccggaagttccgtgcaattaagtgcgaacatctctgcgatatgcgttttccttgacggtttccgtctccccgggattcatcactgaaccccgacgtatttctctaatagttcatcgtttcccataattaccgcatcccactgttccatatcgtcattgtccgttacatttatatgaggatgctgcccaaccttttgcttcactataatttccgaagaaagctttgctttcatttcttgatataccattggcaaatcaatcccctcttggtcaattttattgatgaaaaaaattgtcggaatcttcattgtctgtagtgcatgaaacagtatacgggtctgtgcctgtatgccatcctttgcagaaactaataatactgctccgtctaatacggataaagaacggtatacttccgccaaaaaatccatatggcctggcgtatctataatgttgacttttacatcctcccactgaaaagatgtcactgctgtctggatagtgattcccctttgacgctccaaattcattgtatctgtccttgttgtgcctttatctacgctccctggttctgcaattgcaccactggtatacaataaactctccgttaatgttgtctttcctgcgtcaacgtgagccagaatgcctaagttaattattttcatgtgattttcctcctatcaatatcgcttcactttataattgtgagattgagattattgataatactgaaaaatctgaacagcaggaacttgttgaagatctggttcagataatcacagtattcagttgcaaattacaaggaaaacgagcgaacaaagctaagaaacttatccgagaattgatgcagcaggaggaaacagatggtaaaagccataaaagtaatgttgataccaaacaacgtacagaaaactaagatgtttcagtacgcaggagcttctcaaagggaaagaaatacgaaaatccaaaaaccatcaggaaatatgaaaagaaactggcaaagctgcaaagacagttagcacataaaaaaaagagaagccaaaattacaacaagattaaaaaaaagatagcattatgccatgaaaaaataacaaatagcagaaaagactatctgcacaagatatcccatgagattatcagcgaaaaccaagtgatagtttcggaaaatctgcagatacagaacatggtgaaagatcatcatttagcaaaagctataagtgatgtttcatggtatgagttgacaagacagttagaatataaggcaaagtggaatggtagaaaatatataaagatagatacattctatgccagtagccagttatgttcggtttgcggataccaaaatacagagatctgtagtgcatgaaacagtatacgggtctgtgcctgtatgccatcctttgcagaaactaataatactgctccgtctaatacggataaagaacggtatacttccgccaaaaaatccatatggcctggcgtatctataatgttgacttttacatcctcccactgaaaagatgtcactgctgtctggatagtgattcccctttgacgctccaaattcattgtatctgtccttgttgtgccttaacatcgtgaaattgcagaaaaatattgcctgaaatctgtaacaataagtatggaaccatccggaaagtattatgcaagtctattatatgaaaaatctgactgtgaaaaccaagcagaagaatttgattatgaagacgcaaagatactgggaattgattatgcaatgcatggaatggctgtgttttctgaagatatacagaaggaaaatgaaggatacttcagaaaaagtgaggagcggctggcaagggaacaaagaaagttatcccattgcgtgaaaggaagcaataattattaccgacagaaaaaactatatgaatccgagaatatcctttgatggattgaactggtggatcagtgtatgtgtagaatttcctgactgcaaggaaacatttaatgatgatggagttggcatagacttagggattaaagacttagctgtctgctctgatgccgttaagtataagaacatcaataagagtcagaaagtaaagaaactagaaaactgacattgtccgcctgccggttcacggcagctcgttagaaacctggcatcacaagggtggtatcccaacagcggctccttaatgactggcgtcattaattctctgcctcccacctatcctgtacatgtcataccgggtcccagtatcaaactagagtaaagctccatggggtctttccgtcctgcggtcaatgatggtcttttctaccggctccagtccattctttcctccaacaatcagctcacacaaagacagaataaaatctgctttcagtgacagtggattatcttcctcggaatagttcaggttcagatccattggattgatatactggtcagatactggcgaaacccgaactacctgcccatgcagtgcctgcacaagtgccgaatattcggcttctggatcacagattaaattccacatttgaaagcagggtgatttgcaggattaaattccacagaggggtggaatttaactttgcaatagagttggctcataaagataagtgattattgtaaaaaagttgttgacagataatggaagaggtgatattatatataagctgtcagcgggaacaacgcgaaacagtacagattcataagcagtttgaaaataatttattagaaaaaataaaaaagttgttgacaaacacttagacgtctggtagaataaacaagtcgcttgatgagcgatgcatgaactttgataattgaacaacaaaacaatcccgaaaattcctaaaaagaatttttaagaacacaaaccaaagtaaaatcttttcttttcgatgatttacggcttgatgtgtttctgatatgcagttttcaaggtacatagttatctgcacttggatatccgttacttaattgatttaataactaagttccttttatcttcgtgcgatgaacatccatgggattcggacccatccgccgggactttacattgttatctctgtccctgacgtgctgctttaccggtattgttgcaaaacctgttaccatcttacctgatgctgtattaaagtaatgccatttattatcattgcacttatactccccatacaccattgctccactattatcataatagactcgttttgtttcaccactttttactgggattgtcgcaaagccggttaccattataacggcagattttgacggaggaaaagtaaagctgcctaaactaaaggaagtaaaagcaaaactgcatagaaattttatcggacagataaagtctgcaacggtatcgcagatgccgagcggaaaatattatgtatcaattttggtggaaacggaacatgtggaactgccacatacagatcaaaacacaggaatagataatattttccaggtgcagggaattgcacagaaatataactgttctttaaaacaactggattatcagcaggaagcagcactcatgtcctgtattccactgggagtcaatcggattgaaattcagagagggcttaccacatcttcaacagcgatcttcgtgccatttacgacacaggaactgtttcaggaaggggaagctctttattatggattaaacaaaaacaacgtttgaagtttgcttatgaggaaactggtgcttctgtgaaaaatgacaaagatatggagaaattgaaccagatggatacggatggagtcaatttccgccatcagaaacagaaagaaaaagccaaaaagttttcttatgaagaagcaagaaagatctctggccggctttcccaaaaccgttcggctaacttccagctcactttcgacagtccgtaaccccggtgtgcacgcacatcggtttgggctctttccctttcgctcgccgctactcaggaaatcgatgtttctttctcttcctccgggtacttagatgttagaatacaggaacgatttaacttatttcacaaatgggcagggagtctgcttgacagagttaaaaggataccagccagctactggtaaacttatttgccaaccccgccgcccgaatagccgtatagataaggttcggcatatgttccacaagttagcctaacagcttgcataagtcgtataaaatgagatttgaaaggattagaagctaattatgatgaaatgcgaatggatattatgtcctgtttgtgggagcaaaacccgtaataaaattaggaaggacactgttttgaagaattatcccctttattgtccaaaatgcagacaagaaagattgattaaagttgacaacttgaagataactgtcatcaaagagccagacgcttaagacgcagagccgatgaaattgtggaacaattcacgaatcatcggctctttttgtttcgtatttgaaagaacaaactcaccaaataaaaaaaacgatattcgggtgggttattttgttataccctaaattaccctctgaatttgtttttaaatttggagggtttttatgttccttttttcgggcggttgcccatctgcttatataaagcaaagtttatttatacatagcacatcagggaatggcgggaagccagttaaaaaaatccctgccagtgcaacggtacttcccaccatgaaggtagaagtacaatctccatacaacagaattagtatttcccataaccgtaaaggtcacaaagcctttgcggtttttcttttgtcgtttttggttggaaagtgccgcaggactattattggtgttaagtgtcgttcgccgcctttcaatctggatttttatgttttcaaagattcagattgattggaggaaaaaagaatggcatataacaacggacgtgaggacaggaagtggcgtatctggaaagaagccgaggaaaaagtgttgcgggaacatggagttgatgaagctaccatcgaacaaatccgtattgacgacagggcagactttaattccaacaggcggttttaccattggacaagcgatttcggggaataccttgagggaatggcagacagggaacagtcagccgaagtaaagaccgttgaagatttactggatgaaatcgaagatgaaaatctgtatcaggcattacttacggtggacaggcgtacactgcaaatcgttctgctgaaaatgaaagggtattccacaaaagagattgccccgcttgtgcatttaacgacgggtgctatctatgcacggttagaccatcttagaaaaaagttgcggaagattttatagtcatctaatacagcatgctttcttatgggctattgggtgggggataaaattctcccacccaattttagaataagtgaataaaatccctgtccatagagaatactaaaaagtttgtgcaaaatcttgacagccatattgccgctatggtattctgaaataccaatggggaaattggaagattgaaaattaaataagcacatagatataagattgaaatgtcagccaatcggcaaggctgacatgggttttgaatttcaaagccgctacatagcattgcgaatcagagcgggagggaatcctcttgtcgttcgtgatgcagtgtggcggctttttcatttatccaaaagtcaaaggcaataaaatccagaacggaggtggaaaggacataggatttccttttcggagggtaaaggcaggcattaagaaagccgttacacagaaaaatgctctgcggagttgtccacagagatagcgagcatcggattgtgtcagccacaatccaatccacaccctaaaggcgtgtggactaacttaggggacaacccctagctaccccgataaaaggaaaaataaaactggaggattaagaaaaatgagtagagaaaaatcagaaaaagtatgcattacttttagattgagcgaagaagaacatgaaaaattaaagcagtattcatccgcctgcggtctgtccaccgcagaatttatgcgtcagttatgcaggggaaacgcaccgcagccacagccagagaaagaattttgggaactattaggcacgctttacgaagtacacgtagcctttaaaaagtgtatcccctacgccccttccgctgatgaaatatgcagggagattgaggattttatcttggaactgcaacggaattataccctcccacagcagtttgacatggaaaaattgacggaacagggggcagtctgatatggcggcaacgagcctctggcacatcgaaggacggttgaaagacttaatttcttatgtggaaaacccagaaaagaccgtgccgaataaggagatgcaggacttctttgacgtgttctcctatgtgaagaatccacagaaaacggacaatggagagtttgtttccgccatcaactgtttaaaagaaacagcgttacagcagatgattctaacgaaaaagcagtaccagaagacaggcgggtatatcgcttggcacggctaccagagcttcaagccagacgaagtaacgcccgaacaatgccacgaaatcggcttaaaacttgcgagggaaatgtggggcgacaagtaccagataatcgttgtcacccaccttgacagggggcatctccacaatcacttctgcttcaactctgtttcctatctggatgggagcaaatataattactcaaaatcggagcagaaacggctaagggaaacgtcagaccgcttgtgcagagagtacggattatcggtgattgagaacccgaagaaagcaccgtcaagaccgctgtatctggatgaaaagagcggcaagccgacacgctacaacgtctatctggaagatttagcggaggcaatcagcggcagtcgggatattccgcacatgatgaagtatctaatcgacaaaggctacgaggttgatttttcgggcgggcattggaaaatgaagctgccgcagtataagcatttcacaagattagatacgcttgatgaatgcttaacgcccgattttatccgttcacatttaggcacaagggcaagatatgggaactacaaagcaaagatttcctactctccccatatgcccgaagaatataaaaaggcttggaaaccgcaccagaaaacaaggggaatcttagcgttgtattactattggtgctatcagttggggatatttcccaaaggcacggactacaagccgacaagcccgcttatgaaagaggagcttcggaaactggatgagattaccacacaggtacgctatatgtcggagcataacatctccaccctctccgatttgcacgccgacagggagaagaaccagacggaaatggacaggcttaccaactatcggcggcatttgcagaataagatacggcgtgcttcacccgccgagaaagaaacgctccgagaagaaaaaaacggggtgacggaacggataacggagctgcgaaagcggctgaaatatgcggacgggattgaaaaacgctctgcccacattgatgactgcttgaaccaaatccacgatacggttgaaaatcaaaggtcaaaccagaatggcaggacagaccgcaagagggaggacgcattgcgatgagcagactgacagaacaggaacttacggaaattttagacgaaaataagggtatctcaatggtaaacccgaatagggtgtacccgcccctgccgcctgctgaaaacattatgccccttatgcgtatccctgaacaggcaacgctctgcgagaaaatcggcggcacggaatatacagtgaccgcacatttccgagaggacgggagggacttgcttgggcttctcagcaggatattcatgcgggacacagcagattacagttttgattccgagggttatgatgaggattaagaaatatcggaaagattatcgctttaaagcgttgaagtttgaccgcaggcgtggtatactgtatctacacttcatactatcgtgtctgctgtcggaaaggagaaagcattgcaaagacagcaggaagaaatcaccgccttgtactgtcgtctgagtcaggacgatggacgtgaaggcgagagcaacagtatcgtaaatcaaaaagaatatctattcaagtacgctaaggaacacgggtttccaaatcccacctactatgtggacgatggctatacgggtacgaattttgctggggttagatagcgatactttttacatctaccatgttgcggcggtcatggttgacaacttgcgtcggctcctgctcggtatcaacctgtccgacaaagctataatggatttcgattttccgggtgttggtttcccggtctaattcatgtatcaaaatacggtcgataaactcatggacgttttcataggtcaattcctgtatgtcgctgtatttcccgacaatctgaataaaccttgatatatccctttttcgctcggtaacggttgcgatctgctgttgtaactcgtctatccttgcggcaagggatttcttttcgtcctcatagccggaagttagaaacacaaaccgttcatctgtcagtctgcctaatgcgttgtcctcatacagcttgcggaaaagcgtgtcaagttcggtcatacgcgcctgtgctttgaaaagttccttttgctgctgcgctaatgcctttctcgcttccatgtcgccgtactcggtagctttacagataaagtcctgttcgtgttccttaacataccgcaaaacccgccgcatatcttccagcactaaatcaagaagtacgtttttgcggatataatgagaggtacactcgctgcctgtccttgccctgttgcgccatgcgccgcaagaataggaaaacttgcgcggctcgatatttacgccctgttggtaatacatcttatgtctgcaaccagcgcaaaacagcaagccggaaaaaatatcaatctccgctgcttttgtcgggcggtggcgggtagcaatccgcttttgcgcaagttcaaaggtttcctcgtcaacaagcggctcatgggtgtttgggaagaaatagcgttgttcttcttcgttcttccgggtctttttcgacttgtaggataccttgtgagttttcgcggttatggtatgccctaaatattcctgccttgctaatatgtcatagagcgttttgtccggccaagtatagggggcgatcattgcccgctgataccgcgcctgtcctgtacgctgatagcgcaacgctccaatcgtcaagactttgttttccgcaagccatttttggatttcgcacatacgcacgccgctaacaaacatagcgaaaacctgtttgacaatcggcgcggtttccgggtcgggtataaggtggtggcggttgttcgggtctgggatatagccgtatggatattccccgttgacgcgctcgcctttttgcgcctgtgcctgtttaactgcgcggattttcttgcttgtgtcgcgggcgtaaaactcgttaaaccagttccgcaagggggtaaactcgttatcctcccgcgctgtgtcaactccgtcgttgatcgcgatatagcgtactccgttttcgggaaatacaatctctatgagttcgcccgttttcagatagtttctgccaagacgggaaaggtctttggtaatgaccgtcgccactcgtccggcttccacttcctgcaacatcgcttgcagcccctcgcgctcaaaactcacgccggaaaatccgtcgtccacaaaaaactttgtgttcaaaaaatggtgttcgtccgcatagcgttgaagtatcattttttggtgctgtatgcttccgctttctccggcttgcatatcctcttgacttaaacggcagtaaagggcggtgattttattcgactgtaacattagtcctcctttccgacagccgaataaacaggtataatgtgttgctatcattataccatatcccgccgcctaatgcactactcggacgctaaaaatcccggatttccgggctttttctgcaaatcctttacaatgagtttctcaatctttttatggattgtatcggttgccttttcactcggcaacgcttgaacaagataggtgattttccctattttgcgttcggttgtaattgtctgttttttatccattagaaaaacctccttttcctgtatggataaactatattcgtcaaaaggcaaaaacgggcggttgttagctgcaacctcacgggagtttcaccccggcccatgcttatgggtgcgccgcgcaatactttgagggtgttcaacgcgggagtatcattgtgccgccttgtatgtcgtcgcccacaagctgctaaacctgttttacggcgcggtagttctcgctcggcttttcccctatggggaaaagctgtcatggcgtacccgccgactggctcggtacagacggaatgtacccgtttgcctgttatgctgcgcaccaaaggccgctttctttgtcaaagaacaataggctttgtcggcctgcaaaagcacatcaacagcggatatgcttttgcggaacgacaaatagcccataacgggaagcgtggaaaggggacacgctccccgcatgggctaaaagattatcctacatgaaaagcaagggtgcgggtaataaggcgcacttgcagcctgttacgcatttcctcgtccacataggaataggtattgcccgcgtcgtctttcagcgtgcgggtacaaagtttcgctatgtaaccctcgtagtgcttcaagatcgcgcacatggcggttgtgtcgccgtttgccgctgcggaaatgacagggaacggcaacagattttcagacttcctaacggtattcatcatctgcttttccctccaaatactgtttgattttcgcaagcgcggatttcctgtgccggaaaaccgtcgtgcgtacaacattcagcagttcgccaatttccgcgtcgctcatatccaagaagtaggacaaaaggataatgtcgcgtttcctttcgggcaaagcgttaagggcttcggcaagcagttcatttttgacgagtacatcaaagccggacacttgaaaacggaaataatcgctttcgtattcgtccgttgtgaaaagctgcgcgagttcgctttcgctcaaatccgaaaaagtaacttcgcgtgctgcgcgtttcgcaagagtgcggcggtggcttttcgcttcgccgaccaaagttttctttgctaatgcgtcgtactgatgttgtattctttccttgtcggaagaagatagctccatagagttcacctccttcccgcgtggagtagaggacgggagttaagggcttgtcctctctgcccctttcgctccgtacccgttcgggagatggctcttgagtgcgcttttcagaaaaaagttgaaaaaagcaaaatgcgcccgtccgcaagacgcggacgggcgcaaaggaaatgtaagcagtagctaaatgtattgacagttcacattcatagccggaatatcccgcttgcggagcatagctttttttgaccgcaaagcattaggcgggttacagtaaataaaaatggacacggcgatacctccccgataccgccgtatccttaaaaaagggcgactttaatacactacccgcaatccattctataatagggaacagcggcttttgcgcaatattaaataaaaaagccgataacacataggttttttgacctaatgcgttatcggctctgcgtctatgcgtctggcacttttaatcatttttttttgaatttattatatgtgttagctaactgtccacaagccgcgttaatctctctgccatgagaaactctcatagtaacttcaagtcctgcttgctctaattgatgtttgaatgcaactatttcccgtttctgtggtgctttaattcttgaattgcttgttgggttgtattgtaacacgttaatcataacttttttgccccgaaaccattttgcaagttgtcttacatctgagggccggtcatttatacccggtaaaagcaaatacgcaaagacaattttgcgattatgcctttcagaataggataaggcttgcttaacaacatcttcaatagcatatatgcgcatgtgaggaataatacgatttcttgcagattgtgttgctgcgtgtaaagatattgtcaactgaattttaagatgttcctcgcgcaatttttttaattgatcgaccggaccaactgttgatatggtaatgccgtcggttggaaagttgagcccatatctatctcggagaatatggattgcttttatcaagttgtcataattgaataaaggctctcccatacccataaaaacgatacggtttacttttcgacgcaacaatataatctgttgtacgatttctgacgatgttagattacgaacaaagccatttcgcccggactcacaaaaaatacaaccaacaggacaaccgacttgtgtgctcacgcaaacagttccaccatctcgccgcttgataaaaaccgtttcaatgtatttgttgtctttcagttcgtaaacatacttttcagtatcactgcttttgcaaatattttttaccaacattgatagattttttttgcgtggtaattgcttatataattcttcatataaggcttttgcttcattctcgccaataacttccgacatttctttgtaagtaaatccgtatggatcattccgtacttccgcaggcgtatatttaggtaaacgtttcatttttatatcctttcttctaaataataaaagtttgtttttctgtatttttgattacaatctctaatttttctacatcaatgatatgcgtcaatttgcatttagggcagaaaagaggaaaatcttttaatacagtattatgaaatacttgaactctcgtctttccgttacaaatcggacattttatccaatattttttaagcattatatttcactcgtcctttttacacaaaaaaatgcaggtcaatcctcaacatgagcattgacctgcatttataatgcacagagcagtacaacaaaactaaggcatagcttgcactatgtctatactatatctatacgtcgttagttttttgtatagcatccgcaaaataagcatgacaaaaaagcccatgttgaaaatgggaaaatcctttttttcaatgtttatctaatacgcatgctatgcaacataaacgccgcctccttttacataaattttattttatcagaaaatcagtctactgtcaatacacaacaggaagtatttaacctaatgatatgaattgtgtggacatatccaaaaagaaaggtgaactgtaaaatgtaacagggtgaatgaaaatggcaaaaagacccgtaccattgtacgactttaaggctttcggggcagctataaaagccgcgagaaatgaatacggcgagagccgcaaaaaggtaagcgacgagttatatatttccccgcgctaccttgcgaatatcgagaacaagggacaacagccgagtttacaggtattctatgaccttgtaacccggtatcatatttcggtagatcaatttttcttcccgaacagcaatgcggagaaatccaccgggcggcggcagcttgacgcgctgctggacggtatgagcgataaaggcatacggattgtaaccgcaacagcaagggagataacggaagtcgaaaaagcagaggattaacctcacaatatgagaaatcgggagattgcagcgcatggcggctgcaatctttttttgcgtccaaaatcaaaggaacgcgcaacaaataccgcctttcggtgggggtatggagtagatagcaagcacagcaaacgagtacccgtttgcggaaaatgcttgttgggataatcccaaacccttataccgaaaggcggtgcggaaatggaaaaccgaaagagaaatatacagatgaagttttacgttacggaagaagaaaagcggctgatcgacgagaagatgaagcagcttcccataaagcagtatggggcatacttccgtaaaatggcgatagacgggtatattcttgtcgttgaccgaagcgacacaaaagcatatatccgggaactgcaagcggtgagccggaacatcaaccaaattgcaaaacgcgccaatgcgacggggacggtttacaggcaggatatagaggacattaaaaaggcggtggacgagatatggcggttacaaagacgcaccctattaaatcaaccttaaaggctgcgatagactatatcttaaatcccgaaaagacagacgggaagctgcttgcgtcctctttcggctgcgggctggaaaccgccgatattgagtttgcatggacgcgggaagctgccggagatcgcggcacacatttagggcggcacttgatacaatcctttgcggtgggagaaaccacaccggaagaagcgcacaaaatcggcatggaacttgccggggcggtattaggcggcaagtatgagtttgttttgacaactcacgtcgataaagaccatctgcataatcacttgattttcaacgcggttagcttcgttgactacaaaaagtaccattccaacaagcaaagctatcactttatccggcgcaccagcgacaggatatgtaaagagcataggcttcagtaatcgcagcaaacaaaaactctggtacgattgccaacatataataacaacaggccatgataactttcttccacttactgccttgaaaaataataatagcagcaatcgtataacttgcgggaataatcgcaatattaaatagcgtcgttcccatatgatttgcaataaaaatacaaagtgccgcagcaaagtacaccccaattcttttccataaaggttctaccctatacggaaacatatttttcccaaaatcattcagcatccatacctgaaggctgcaaactaaaacatctcttagtaaactcatcagatcaaccattcctttccctcagatattcaaacagtgcctcggtaaactcttctttctttgctcttgaaacattcagttctattccgcatttcaaccgtagtacgcctttttctaacccttctacttttcccaacttaacaatgtaactataatgcgcctgtgcaaatccctgatcttttagctgttcacataattctccaaacgcttctctgcaccgaactgtctctttttcttgctctttcacaatggttatctcacatcctcttttggctctggaaacatataagatattttccacatgtatgcgtattatcttccccgccgatgtcaccgttaccgcatagtcattcagaaagcgtctctttacctcagtcataatagctgcaatttcccggcgtaagctggtatcgtgtaagtccttcataatataccgaaagggctgtccgaaatttatactgtccactgtcggctcaaaataactggaatagaagattaaaactgcatctttgttataatttctcaattttaatgctgtttggtttccatccagccccggcatacggatatctataaagactaattcgtggagaatatccgtatgtttcaaaagttcatttcctgattcgtattcataaaatctgatttcattttcaggcaaactattttcatgctctataatctctctgatcgtttttctatatcttttatcatcatcacaaatcgctatcttatacataatcctccctcattgttagttacagctaaccttatttcataaaaaaaccatcccgcagaattttgccatgagattatctcttacttctataactccggttccaactctgcaaagatggaatctccaaaaaattctggtattgtgatttctaatccatcacacaatttcttgattgtaactacgcctacattcttactctgcccatacaaaatattcttcagcgttgatggcggaacaccagaacgtatcgccgcctcattcacggtaatatccttttgccttatcaattcttcaagacgatatataactgctgttttcatatccatgatttctaccaccttttctctattctatataaattgcccgtaaaaggtcgcccatatatagtctttttgaacaaagatacatctttgtaagctttgtatactttcgtggtagataattcagcatttttaccaagacaaaaaaagccggaagccacgttgtcatccgtgacctccgactcgttttgcttatactacactgtccttacactcaaatcagctcctctcgccggcttatcttttccctgtttttcctggatgattctcttattgatttccaagcgttcatgaatcgatggttttttctctttccttgccattgcctttttctgttccactgtctttctttctgctttccctgcatccttaactgctgtatttgcttcaacgccagttcttggcacagtttctctgctctcatttttctctgctatcttctgttctcgtctctcctgcacacctttttcttccaggctgcaaaaactctgcaaatacggcagtacatgattctgcatatccgtcagatcttccatatacttctgatactcttcattgccttttccttgctgataactgatccagctttcatccgtcaatttcatttcattctgcatctttaattgactgatgatacctccgtttccggtaccaatctctatcttaccttgaaaatgatgcagcatcttgtcgcccttctcagcataatatactgtaaaaaacatctgtgctgtcgtttttggttcgttggtgtttggatcaaggtcagcataccaggctttgtcctgttctacggttttggaatccaaatcagataacttctggcatcttggattccccaaatcacttttctcacaataatttacatacaccatcggttctatatcttttggaagctccggttcataggctttcagtctttccagcaatacgcctgcacgaacagacaggtcgcatttttcgtccacaatatccttcaagtaagaaacatagtaatgaatatttccacttcgcaaatccagcattacttcctgtatcgtattttctcccatctccacattatctcgatactcatacggatcaaatgcttctgcaatctcatccagtgcctctgccagctgttctgtggtcatcttctctggatacattgcttctcgaacatccctcatcggtacatacttgtagtctggcaatgcttcatgaattttctcaatcccttcccgtaccagtgcaagctctccataaaactgaacatcatccatcagatttccaagtactgtatttccttttacgattgcaaattcggcttcatcatagtaactgtcttccggatcacgatagataattcccatcgagcatcccagatacgcagtttctggattctccttatatttttcatagactgcagctatctgattaacatcggtacttttttcataagctcccatatcatggaactcatcacattctgtggcaaagtattccagataaggttctttcttcagtggcatattgttaagtacattgtcaatcatgttataattcgcctcttccagttcttctaccttagccagtggcttatattcgccctggcttttctgaatctctgccattacaacctcatccatttctttcactttttccatcaactgatcataatccccacagatgcgttctccagtccagccttcgtcttccagaagttcctctgccgcttcttcaatagaaatttcatcattttcatagacgccaccatccatcagacggaaatcttcatcgtaaaaggaataatcgtatccttcttctgtcctctgaatagcaaaataccgttctcctacctcatatgccagttcactaagaatctgttcttccagattcaagaaagaatccagctgttcaaaactgatactgtctacaaaatgagctgttactttttccccatcattcaaaacaacgatatcactgacagacagggaatgcccacggaagtctttcggtctatcaatgttgaacctttcaaaaatatcatccagtgacgtatttcccagtaattctccaacatagaccagcttataatcttctttttttatctgcataccatgactttcaataaaactcatattcataaatgcataattttcgcccgttaaatcatctttgatctgataaataccaaaggttcgccttgttcctaacaacaggtttgcctctttcaaagactgaatctgcggatatttctgcatttcccattccaggttacggaaacgctcccgttctgccatggacatctgataatgctccggtcctcgttcgatttccttgcgttccgtgacatagattggtgatgaaaaattagtgatcagatagatatctgctccggcatcgtataatttcagtgcttcttcctgctcaatgacactcataggctcctgaaatgctccaaaatcttcatcggcataatccagatcctgatcccttatccgttcccacatctgtaattccatgccaaacagaccttcatgcgcctgtatcatttctttacttgcatactcttctcccttgtcaccatcgctgcccaggcaataaattttagaacccattctgtgataatccaaagctgcttcttttctaagcggcaccatgtcttctgctgtatatccataatcacgtaattccagcttgcctatggttggatctggtaggtcctgaatatccatttttgcatcatccagaagttcctctactttatcttcatctgcctgattgattgcatctgtcagatttcttaccaacgtccttactttctcttcctcgccaatcagatttgcatattcaaaaatctgttcttttacatctactggaagcgctattcccatgtgttctgcacggtctatctgttcctgcgtaaattcctgcattttctgcgtttcttttcctgttatcatatttctcgccatataaattcctcctgtgttctaaaaaaaggcataaccggcagaaccttcttctaccaaattatgccatctttcctgtttatttattccagaccgaagtcccgttttctggtttccttgccagtttcactttcccgctgactcttttctttataaatctgcagtttctcatgaatagaacctcgtgccggtctttcttctttctcttttgattccgactgctctgtttctgtatcttcccgctcatccatattgagaagtgcatttaattctgacagccgctccagtttttggctcagttcctcttcttttggaaatggcttcccgacttcctctttggcatttgtcatctgctcctgaaccgtttccagccgttgttctgcttctgccagtttctccggatagctttccaaaaggttgttgatacgagtgatatttcctagagcatcggctcccaaccgaactttagctaccgattcatgctttacagacaggataaactcttttctccagctgtcgaattggattctcatgttaaatccctgataacttccaatgtccatagctgcatctacagacttaatgtcttggcagaccgccagaagtgccatacctgcctctttcttttctgtgaacactttgccactgattttcatagaaaactgctctggatctgtgattttatgctcagaaaaatgagcgatgtctgccttgtagctgtcaatgatctctatcagttttgcaatctgttgcgggaaattccttgcaatatcatcttccagtcggtattggttattcatgtggttcgcttttaaaagctttaatttcgccacatccacatccaatgccatcttctcttttactgctggatttccggttgccagtgctttgacctctgcataggacagtgccgcttcgtccacatcttcgcagcttctgaccggtgctttgctcgtcataatctgggagatgaatttctgcttgttctcgattaactgccacatataactgtcgaatgtggattctgttacataccggaagatatgaacctttttattatggtttccctgacggataatacgtccttccctctgttccaagtcagatggtttccagccaatatctagatgatgcagggcaatcagacgatcctgcacattagttcccgcacccatttttgctgttgagccaatcaaaaaacgaacctgcccggatttcacttttccaaacagctccgtcttttttgcttctgtatttgcatcatgaataaacgcaatctctttttccggtacacctttctctatcagtttctgcttcaagtcatcataaacattaaaactgccatcgcctttcggtgtactcaaatcacagaaaatcaactgtgcggatttctgtgctgctgtatctttccatatttcatagcttttctctgcacaaactgatattttactttctggattatctggcaataattcattcaccaaacgctgatccaatgctaacttccttccgtcattggtgatttttagcatattatcgaccgaggcatctaccccgccgtttctgacaacttctgcacgttctcccagactttctacgatttctttctgttgttccgttggtttcagcaccactgtttcatattccgcttccggcacaggaagctttaactgatcggaagtcttgatatctgcaatctccttgaacatattcatcagttccggaatattataaaaccgtgcgaatctggactttgcacgataacctgttccttccggtgcaagttcgatactcgtgacaacttctccaaaagtggaagcccaggaatcaaacaatccaagtcccatattttgtaatttgctgttctgcagataccgctgcataacatataattccgtcatgctgttgctgattggtgtgcctgtagcaaaggtaatgcctttccctccggtaatctcatccagatactgacatttattgaacatatctgcggatttctgtgcttcattctgtgcaatcccggctacatttctcatttttgtatagagaaacgcatttttatagctgtgtgcttcatctacatacaaatgatccacgcccagttcttcaaacgtaactacctgatcttttttctccttctgattcagtttttccaatcttgtctgcaatgtttttctggtcttttcaatctgtttgacggtataacgcccgccgtcctgttcataccttgcactctggattgccatttccagatcatcaatctgcttccgtaacatagcttcctgtctctcatcagagattggaatacgctcaaactgggaatgaccgatgataatggcatcataatttcccatagcgattctggcacagaactttttccggtttgccggttcaaaatctttcttcgttgctaccaggatattggctcccggatataactgcaggaactccgctccccattgctccgtcaaatggtttggaacgacaaagaggtttttctgagataatcccagacgtttgctctccattgcagcagctaccatctcgtaggtcttcccagctcctactacatgagccagaagcacattctctccgtaaagctggtgtgcaacagcatttttctgatgcggacgaagctctatttccggattcattcctgggaaagtcaaatgactaccatcgtattcacggggacggatgctgttaaatcgttcattgtacacctttaccagtcgttcacgcctctgctgatctttaaaaatccagtctttaaatgctgctttcatggcatcctgcttctgtgatgccagcatggtttctttcttatttaggacacggatttcatcaccattctcattgacactcttatcatagatgcgtacatctttcaggttcagggtatcttccagaatcttataggcatttgctctctcagttccatacgttgcataggcaaacgcatttttgggactgtcggcattctttcctgtaatcctccactcaccatttacctcagagaatttcacctgtatttctttctgaagcagataccatggtgtatgcaatgtttcttgcataaaatcctgataatccgaaggttcaatccaggtagctccaatacgcacttcaatctccgatgcttccagatctctcggctgaactgcctctagtgcacgcacattcgatgtgaattccggatgattctctgcaaaagttctcgcagtatttaatttatccctaacatttccggagagatattcatctccgctttcccactggtctgtcagtggatttttgaagataactccaaccagctcttctgtaattttctcttcggtctttccggtcagctgtgccatatatgggagatctactttagccctttcatttaaagacagagcaagtgcttctgtggctgtctccacacttgtcacagcaaccgcctttttgatggttcgtttggtgaacatgtccgctttccgcttcaatgttccgtcttcattcaagtcttccagggaacacagcagacaataagaagagtcatcagaaaatgcccgtttattagcattacttccaataactccatactttgctgtgtaggtatcatacacctgattcagtttttcctgctgtttttggatttcttcgtctgtgacaaattcttccatctgcatggcgatcagctcacgaacggtatcacggattgcaaccatgccttttacacgttctgcagtggctgcaggcattttcacctgattcatcaaagagttgacacggtaatatacctgatcatctaccaccgtatagctgtaatttcggacattcggatctgccggaatactctctggcatctcatccagttctgcctctatatctactgccgctaccatgcttcccttgatgtgttttacagcttcttgtaactgtaattccagaacagctccttccattggagcacaggttgtttccataccatacggaccggacacttctttcatctcaccaagaatcattcccggatgctgaacaaaatacttgttaatggtaatcccttttgcatcactctccaaattcacccagtctggcatctcttttgtgaaactctcacgcttctggaaaaacaaaatatcagcactgacttctgttcctgcatttgccttaaaagctgtgttcggcagtcggattgcccccagcaagtctgcacgctctgccaaatatttccggacttccggtgatgccttatccatagttccctttgttgtgatcaacgcagctacaccacctggacgtaactgatctatagtcttggcaagaaagtaatcatgaatcataaaattgtagcggtcatactgacggtcattgaccttatatgcaccgaatggcacatttccgattgccacgtcaaagaaatcattgggataatccgtcttctcaaagcctttgatctggatattggcatctggatagagaagtttagcaattctaccactgatgctgtccagttccactccatagagtttggactggtttagattctccggaagctttccaaagaagttcccgactcccatagatggctccaggatatttccctttgtaaatcccagattctccaacacctgatacatactttcaatcacaatcggctgtgtataatgagcatttaatgtggaagctctggctgcagcatattcttccggtgtaaggacggtctttaattccagatattctgtctcccatgcagattttgtctcatcaaatgcatctgcaagacctccccagccgacgtacctggataagatttcctgttcctctggtgtcgcattgcggttctcatcctcacatttttttaacagctgaatagccataatattggctcggaatttctccttcggtgttccctgtccaagttcatcatctgtgatatggaagttcgttgctggaatcagttctgctattccgttaatctcttccaatgattctttttcttccgatacctcaacttctcccgacagttctttttcttttttatcataatctgtccacacacgtttagaaatagcagtaaaataggaagactcttcctccatgatttcttccttgatttcccgtaatttatctaaggtatccgcatttactgttttgttgtgataatgataataaagtacttcttgtccaagttttacatccagacgttccaattcttgtgttgacattcgctcccaaatatcatctttttccgtatgaatcgtgaaaccttctccatcatcatgatattctaatgtgtattgaagtcgattctcttctcccttaactttgcaagcaaaatcatagatttttgttctggtaccggacatatattctgaatcaactagtcgcagatccgttatatcttccgctgtaaaagtatcctgttccagctgttctcctaacatctgctgtgcttcttccaggtctgccagtctttgtgcttcctgtcgctcttcgtacttttccatttcttccggtgacaaataatcatctgtgcggattaactggcgaacacgttttgcaaccttattccactttaataaaacttctacctctggattgccaatcttcccttttccaagctttaatccttttgcatcgtgggatgcgtcagaagcatctgctcctggtattccgggtgaagaaccacctgttccatattcatttttcaggaactcagctgcatctttcatatcatggtgctccatgaaatactcatagattcggttacgtcctccggcagtaataccgcctcttcttaacactgcatcaatttcatcctgtgtgataaaggatagagccggtcgctctactttaaactgttgatccacccaggaacgctccctctggagatctttataacgttggaaatattcaggattatgctgtatttcccagcgatgataatcttctggattcttttccatatcttcctgaagccattcaaaacgataggctgtcgcagctgcttcttccgaatctgtccaagccgcccctactacatcctgccagtcagaataagacaaccgttcttctctgtttctgctcgtatcacggaaatggagtgccagaagatctgtcatttctttctgttcctgctcgatagcattattggagataagattatcaacgtaatttccctcctcatacatatctcggattctgtcagcggcttcttcccacgtaacgatacggtcaaagtttcttctggcagaatcacctctccggatacggataccatcgttgtcgtaccagatactgattttctgaccatctatggtaaatccttttcctccagttctatattcatctttcaggaagctttgcatttcttcattgtccagaccctcaatcaatcttgcagtaatgtgaaacagcgtatttttctgtccgcttcctgttcggagaatatcgtctaccacttcatcagaaataagaaaagcggctggctgttctaatgcagctgccgctttccttatttcccctaactgttcctcttctgttgggaacaggcttaactgtaaataatctcctgaatcaccagttcctctgcctgtgctttgatctggttcatgtgtctggtccacgccattgtgtctgccatcttgtccggtgccggatctttctccagaagttcgttcatcaggttgtctactctctgtcttgcctgactgtcgatctccatcagatgactgtccagacggttctgcagagtcagaatgttgaaccttgctaccttgtgatttctcagatactctttcctcatcattccatacttcccgatggttcctctcgtctcttccaggctgatatctggaatctgatactctccgttctggctgtaagtgatctctctcatagtctgtttcctccttattttcttctctatcttctgttttatttgtactgttttcacgcattaacgtgttaaattcattatagactacttctttttcttttgcaaccgttttcaggtcattttccagattattcagcacatatcgtccaatctgcatcaggactggtctgctgatctcattgactgcacttcccagatgtcctaatactatcagctgattaaagtccgtaatatgccgaaaatcctctgcatccagatattcctgtgcatccagtccacaccggtttagtaatacataccagacactattggtcatcagttcccgaaattcgacttcctgattctgttcgtccagttcttccagaaatgtccctgttacgtccagtctcagttcttccaatgcatctggaagccattcttgcatactctccttcgctgcctgatgcagactttcagcaagtcctccttctgtatcttccagtgataactgctcctgcagataatctgccaccagctgttctccttccaccggaagattccataactgaggatcctttccaagattccgcactttataagtgtcctgcacatcaaatacataccgaagtttcgttttcggtccggaagtattgtcaatcaaggcaatccctttggatccctttttgatccagcggtacatcttctgattccagatttccatggatgctacggcagttgcttccggtcgctgtgcataaattaaaagctgttctggaaaagtgtatttgtacagtctggatgcagtgtttaggaaccgcatccattcctgcggactggcagctacatcttttgccacctcttccgtcagctgttccattgcatataatttatttgccatgcgctactccttttcataaaatcagggactgcttagcacagtccccttaaaatcatcgttgttactctttataatgctgtggcaagctcttttgacttattctttggcactttgtctccctcttttgccttgatttctgccttagctttctccagtcttccatggattccaccttttacttccgctttttcggctgctttttctttctccaaacgagcttccctacgctcagcattttccataactgccgttttcccatcacaaaactgaactttatcggaaagctgctcctgtctctccacctttgtctcattgacttcctgtaccatcgcatttaattccggaacctgaaaaatgccgttatcaggaagaatcagcacttcatgaatggaagatgggatgacaaagtaatcacttcccaggcattccccaatctgtttacgaatatcttcctgcagtaacagggacgctccattcatcttagctttgtttgtcagacagaacattgggttttccatggcttccatatccattttttcattcagcaggttttctggttcttcaccaaaaatcatagatttgataatctcattcatatccataagtgtgacaccacgttttcggtctgccaccatcgcatccgcttgaatctgttcggcagatactccccactcgttcatcagagaaacagttaccggaatactgctgatcccttctccattttcctccagatttactgcataataagctgcaaaatctccgtgttctgtgactactttatctgcaagaagatcggtattccattccttatcacaaattctcatctgtaatttgtccttcatcttttcataatccagaatatctggaactcccatatcaaaaaattctgcttttccctgtgcctcaatacgcatatcagccacatcgctaacacaagagtctacatcttttccatggatatattcctggtagagggaatccagatagactgtcggtacgattctctgatctccgtttggaatcgtaatacctgtcagcttcaaaccgttgtttttttctacttcctgcagtttaatttctgcgtccttataagactctggcagatactcctttacattgtctttgacatattcataaaattcttttctgttcatcatacgcttttacccctttctgatcatgtgatggttcactctttttctactgaccatctgctcggctttcttctgataagccatcattctctttaaagttttctcctggttcttttttgcttcctgtctttttaccattgttttcatcatagttttctgttcctttctttcattagttgtattgaaaagggagccctgattcagggcccccctttactacaaattaattactttactattttctgtttttcttttttctgatataaagtcctgccatacctcctgtggagattaccagaagaagaatcggcagccaaatattcgtgctgtcacctgttttcggtgcatttgatacctttgtctcttcatgggactgtggtgtatccagtgttttcggtgtttctggaacttccggtttctcatttgtcagattaaaggtaacttctacaaccggtgtactgtcatctgcataggcaaatgtcacttcatgcttggtctgatccagtgtgtatccgtccagtgtctttgtttccaccagataatacttgatagcggtatcatatttgccgttcttaaatgtggcaatctcatacagcttactttctgcatgaccggcagcatctgtctttaaggtttccagaacttttcctttgctgtcacgaagttcaaattctacccctttcagcggttctcctgatgatttatctgtcttattgagaatcacttttcccttggcagtgtcatctttcatagctactttctggatctctccagtatcctttacttcaaaactaacatccgatgtcagaatatatcctttcggtgcctgctcttcacgtaaggtatatttaccgattggaagtttttcgatatagtgtgcttcctctgtggaagtccagctctctactacctgatcatccttatcgagaatcgtcagtttcgcacctggaatctcagtttctcctgtgatatcagtcttactgatctctacttttgtcacatcatctttcatctcatgcttctgaacctctgctgtattctctactgtgaaagtaatactttctgcagtgacatatccatctgccggttttgtctctgtcatggtgtatttcttaccaacaaccagttctttgatcacatgggattcttccgtagaagtccattcatctactgtattgccatctgaatccgttacttttaggtgtgcacctggaagttctttacctgttgtcaggtctgttttggacagctccactgtggttggctgattttcaaaagtaaagtcgtagcttacttctgcctggtcttctccggcatattcaaaggtaaattcctgtacttcttctgttgtaacaaatccgtccggcgcaaagatttctttcacatagtattttccgtctaccggaagatctgccgtaaaaataatctgtcctttttcatccgttacccgctgctcgatcagactgtctttctcaagaagtacctcgccctttgcatttttgatatcttcactggtataaagaccgaagacaccacctgcaagaacacggtctgtatctttttctttcttcagaaccgtaacctttactttctgacgggcattctgccatttctcatcataagtgatgactggtgtgtcctgatcacggtaggaaaggtcaacatatctcggctctttgtccagcacataaccatgggctgttttcacttccttcacatagtattttccagccgggagatctcccatctgtgcaataccattggaatctgtggtaatggttcccactttttcatctgctttgaaataatcttcactgacaccatctgccgctttgatatcttccgcagcaaatacatcgaacgtcacatctgaaaggcttccggttacatactcaaagagatgctccacggtaccttttacatgatccagaagtgttatcttatccagaaattctccatttttgttgatgatcagaagtcctgttggaacttcatctttcatctctactttctgaatctcggctctatcttccagcgtgaacttcacatccattgctttcagatatccatacggtgccatttcctcacgaagagtgtattcctctccaactgtcagtcgtttgatcacatgtggctgatcttttacagaagtccactgatccacaacatttccttctttatcaagaacagtgagttttgctccatccagttccacacctgttgttacatcagattttgtaatttctactgttgtcggctggttctttttcactgttttcagttttactgtcttcacatcctgtccctggtaagaagcatccagattcagaacttcatcagaggatacaaatcccgccggtgcttttaactctttcacataatactgtccaagtggcagatccagcgtacatgttgcaagaccatcgttatcagaagtcatttcctgtaagagtgtgtctgctttcacgatcacttttccatctgccttaatatccgctttgttatagataccaaagacagctcctgctacggttgcaccattttctgcatcctgtttttctacctggattacaactttctggcggtcatcgccaacagtcacttcctgttcgattacaggtgtatcctgatctgcatagacaaatgcgacatccgatctgtcatggttcaggacaaatccttccggtgcagtcttttctactacatagtaagaaccaagcggcagattatcagcaactgcttttccgtcttccccggtcgttaccgttgttaccagtgcatcttttgcatagatcagctgtctgtttccgttttcatctttctgataatccggtgtatagatattttcagctgcatagacatgaaatgatgcacccttcaggtatctttcttcataaacaaagtcctttttaaatccggtcagcatctcaccttttttatagatcgtcagctttccttttaccggatggttctcgtagtctaccgtaataatggcatctccgctctcagaatccatctggtatgctgtatttgcatccaccgcaatctctacatagttcttattgattgtgtacccttccggtgcgttgacttcctcaatccggtaatgtccgatcttcagattcttcggcatgatcagatatccctggctgtccgtaaaataggacttgtgagtagttgtcactgggtaagttgttacctgctccacatacttcttgttgtccaggtcatataccttaaattctgttccggcaatcaatacagatttctttgtttcatcgtcttttttcacgattttcagttttgccttaaactcttcatccagaagcactcgccagatctgtggctcgtttggatgatgttctgtgatattcacttcaaaatcatcgactggcttgtaattgtgcggtgttgtagtttcacgcacgatatagcttccaaatggtaatggaatactgcaggcataccctttttcatctgtgaaaatctcagttgctccattttctccactcactactggtttggcagaatcaaaatcatagcttccatctgctttctttgtaagggaagatttcagataaactgtaaatccagctccggataacagatctgcatcggtctttccattgttggctgctttgatgatctgaaatggctgtttgatgacctgctcactggaagtgcactctcttttcacttctgctgtcatatctccttcataactgcacgtaagatcatgctcttctgtatctgccaggtatccggtcggcggtgtgatctctttgatataatatttgccaagatataagccatttacagaagcctgtcctttgtcatcggttgtaagagaagctacctgttctcctgctttataaatagttccagttgctccatccggatgcacgatatcttcacgggcatacagaccataaactgcacctttcagtgtggcatctccctgtggtactgcttttcctgtctctttatcaactttgaataaattgatctttgctgtcacacggtcattgctgaaggtatgggcaaatgatacggttgcttctttatcattggtataagaaaacttaaacgtatacacatcttctgtatttcttacatagccttccggcgcctgatcttcttttacagaataggaatatccaatcggaagatctgctgtgaattttgcagttccatctgctccagtagttgctttctcaatcaatgttccttttttcacaacaacggttccgtctgcatttctaatatcatcggatgcatacagagcaaaaataccgccattcagtggtttcttggtatctttatcctgttttactacggaaacatctgctttctgtctctcgttgttaaaagtcacatctgcaaatacaacttctttattctgtccggcataggtcagagtcactggcttttcttcgctgccgttatagaaattgtccggtgcttttgcttctttcaccacatagcatccaagatgcaggttcttcagtgtaacagaaccattctcacctgttgtcagattttcttttacaaggtcccctttgctgtacacttttgtgccataagcagttacgatatctgctccggcatacacgttatatactgcatttttctgtctgcggttttcatactggaataccgttccattctcactgacctctgctccggtaagcacctgtccttctttgtaaatggtaagctctgccagctgttccttattttccacggttacagctgaggtcttacttgctaccagttttacatttgttgccgttgcatttaccacatatccctgtggtgctatgatctctttcagataaacagtatcctgtgtcttgatgatcgtaacagaagattttccattcttatctgttgccggcatctgagtgatcagttttgtgcaagactcatcgctgtatataccgaatactgcacccgcaagattaacatccgccgtgtcgtctttctttacgatttcaatcgtagcctgttcaatccaggacacctttaagcttacatatttttcatcagcgacaccttctccaaacacaaatgccagatcctgaacacttgcattcgtagtcagtttatatgctgaataatcttttgtaatacttcccttcatttttgcagaaaaagtagcgcttacatcttttgtctgtgtcagaggcgctgaaagataaaacgtggttcctcctccaattgttacgcttgcacctgccgcacttacggttccagtagatacattatggagctttactccttttggtaagtccattgtgattttctgctgggaagatgcgttgaactgaatgttctccgttctctgaacatttccatctacataagcttttacattcggctttgaaaatgacatcgctacatctggtatttccggcttattcacacaataattatagagttcttttgccaaagcctctcctgtagcatttgttccgtaaaaggcatcactacttccgttggcatatgatgcagccatatgaataatgatgaatctttttccttctgaaaaatccgtgtatttatttgcaaaaaagctttcacttcctgcggcatctgtaccgtaatagcacacttttgctaacgcctgattgtctccaatctttgtaattgtataatttccagatccaggtcctggctttgctggctgtacacaatacgcaattgctctgacgcttccgtagctgatatagtacggctctgtcaggtaggttccaagattataatctgcatatctatacagtgatcctttttcaattgttacctgctgtgtacttcttgctgaataagctgaaactgcttcaaatgttgcaatctctccttcttccatagaatcaagatccacaccttcgtctcctgcctgttccaaaacatcatgaagctctaaccctgattcttcatcataggtatcctggttctgtgcctgctctaccaaatcatcaaattcatcagcgtcaatatcggtaacctccgagtctgcttcggaatcctccgcttcctctgtctgctgttcacttacagctttttcggattcggtcactgcttcactccctgccacctctgtctgagcttctgttgctttctcacgcacaatcagttttcggctgatctggtacttcggatgctcctgatttaccggttccacataatagaccgctttgtaagtgtccgcatgatctgtcgtaaaatcctcatccttgtcgttctttgcttcctcgaatgtgactttgaccttgttatcatccttgatttccagtcctgtgtaatctgatttcacatcaaatacactgcctgtttcgatttcataatctttggcagtcaccacctcatcttcatccagaaggtctttcacgtcctcataaagtggcggttttttctctggctggatctccgctgcatatgctgtcatcggagataacactgtacttagcattgtcatgcctgccagcaagccagatactacttttctaaaattaccttttttcttcatgctaaggtcctctctttcataatatttgtattaaaacagacagtccttagactgcctgcaatacactgcttatcgttgcgggaaactcagattgaactgcacatttccctcgccgagatcaaccatctccacggttgcttcatactgtctccctgtttttctggataacagatccttataatggatttttcctttagacaggaacttctttgctgccgccttatccatctttttcccctggcttgcaaggaatttatcattcttccataaggcaaaagcacagttccggtcagaacagtaaaagtttacttttccttccctgacatcagctccacagcggggacatttgccaatgacttctccttttgcttttccctgaaactgctctttcttttcttctgaaatcccctgatatctggcaaccagttcctgcatcagctctgtaatcccatttaggaattcatctgctgtctctgtattctgggcaatgtgattcaatgccatttcccactctgctgtcatcttcggagatttaatctcatccggcagaaccgtaatcaggacattgccatcatctgtcggcaccagatttttcttttcccttttcacaaaaccagactgaatcagtttttcaatgattgctgcccttgttgccggtgtgccaagtcctttcttttctgtatcttcggtcagttcttcattccctgcacgttccatcgcagaaagcagggtatcttctgtgtactgtttcggtggctgtgtaaaatgctccgatacaaaagaatcacaaggaccgtaatgcttgccatcccagatatccagctccggctcttctttttcactctttacgccaaagaactgtttcaatttattttcgatcgacttgaatccttcctgctttgttttctttgccgtgagataaaacgtatgataattacaggtaatctggcatttatggctttcataaatataaggatctgcggttgctgtcagtaccctggcactgatcagatacaaaatcttgcagtttcgttctttcagtttacctatatctgcctttgctacttccatggtcgggataattgcatggtgatcagatactttctttgaatttaataccttactcacgtccggctgatattccagcccttcggcgtagggcattttcccaagcaacatctgaatcagagtttctgtgctttctcccatctcatctgtcagatactggctgtctgttctcggataagtaacaagcttctgctcatacatctcctgcacggcatccaatgtctgctgagcggtatagccaaacattctgtttgcttccctctgcagagtggtcagatcatagagttttggagggcgaaccgttttctctttcacatcatccttctccacttcgcacatacgctccatacagtccgcagccactctatctgcatcttcttttttctgaaaatgctctgtgaccgcatccatatcgtcaaacttgatatgagccatataatatttttctttggtaaattccttgatcttctgatttcgatccacgatcatggcaagtgttggtgtctgtactcttccaactttcagnnnnnnnnnnggaaaaaagacggctcgcattgattcccaccagccagtctgcctttgccctgcaaagtgctgactgatagagactgtcataacacgaaccgtcttttaatgacgcaaatccatctttaattgcctgttcttccatagaagagatccagagccgcttcatcggctttttgcatcctgcctgctcatacaccaaacgaaagattaactctccttcacgtcctgcatcagtagcacagatcacttcatctactttggaatctctcatcagttttttcaagattccgaactgcttctttgtgccctccaaaatcttgtgtctccagcattccggcacaatcggcagatcttcatatctccattttttatatttttcatcgtattccgatgcatcgcataatccaaccagatgtcctacgcaccaggaaacgatataaccgtttccctccacgtagccatcttttcttgttctggctccaagcacggaagccagtgccatcgcaaccgatggcttttctgcaatcactaatttcatttactcctgctcctcttcttcatcttccagtacatcatcattaaaatcttcatctctcaggatttccggttctgcactttcttcctgctcatctgcatcgtctacttcccgtttttctgactctgaatcttcggattcatcttcatcctcttccatctcatcttcgtcatcatattcatgctttggtttatagactttgaaataatatcctcctgccgcagctccgactgcaaccagtgcaatcaaaagatacgttccgaatggacttttatcttccggcatctgaatatcatcctctaccttatctttctcagctgactctgtcgtttccggtttttcttcctctgcttttttctctggttctgcataaaccgtatccacttccggaagtgtcactgaatcagaaagtgtgaagttcatcagatctttctcactgacttcggtaaggaaatacacattatcctgagattttgaattgtcaataatcagatagaaaatcttaccactcttcgttgaaatggtataaaactcttttgttccttccgtagctgtttttgtaacggattctgccgtctcgccttctttattaagctgtttctcaatacctgttactgtccgatcatccacggtcccttttgcatctgtcggctcagaagcctgtgcatcctgcggaagcggagaagtcgttgttttttcagtccccattgcatctgcactggtcgtagttgccattgcaccattgctgtcactggaagatttctgtttttctgcctgcttctttgcccattcatagtaaggattctgcaacacatacttttcagaagtatttccagcaccatctgttaccgtaatctcaatctgctttgtagtaaaatctttctgtgtcagttgcactctcagcattccatccttcaagtctgtataagtggtgccattgacggttaccgcagtaatcccggatactgtatcattcccctgaatcgtcagcacaccatctgtcagagaagcagagagtgtcggcttttccgtgtcataacacttaatagagcgattctgctcatagaccttcccctcaccatctgtcacacgcacatacactgtctgatttccagtgatcgtgatacttccgcttccggttacatcctgccagcttccatcttttcctgcttttgcttcaatctttgctattgagaaaccttccggcatatggctagcatctaccgtaacagcaatggttgtttctccctgtttccagccatccggtttctcaatcgtgattgcaggtgtggtattctcagctgcataagcagtctgtgtctggagcaaaggtgttgtcaggcaaagaaatgtcgttgctgcaagcaggctcttttttaccctgcttttagtaattgttctcttcttctgtttcattttttccagattcatcatcggcttttgtttcctccttctgtatttctaccctgccgggcagttcatttttcattctctttttgaaagcttccaattctggaatactcatatccattgcacggataattcttacaatttccagattttccgcttctgttttggcaatctccgcagccttgaaccgctttaaatctgcttcatatctggctttggaggcttccattttctctttggctttctcataatctgccgtagctttttcaagacttttcatcggttctcctttccggacggctgatgcagccgcccttttttcttaccatcgtccaaatccatagaaatggctctgccagtatggggaattgatggacgtatactgcaccggatgtccacaatggatcatctgaccattgcctacatagattccgatatgcgttaccggctcccctgcgtcgtaagttccagtaaagaaaatcagatctcccggctgcgcctccgactgggatactggtgtacaaatgttgtacagtccctgtgctgttagtcttcctgtattccttacaccagagtttgtcagacagtagcttacaaatccagaacaatcgaatccacttggggaatatccaccccatacatatggtgttccaagatatctcgctgcttcatttaacaaacgctgtgctgcttcactggtatattcattgccgccaaagcctgctccttctccagtttccagataaaagatcgggtttaaccgctctccatttttcagaagttcaatatgaagatggcttcctgtggaattaccagtatttcctacaagacctatctcatcacctttcgtgacggatgctcctgcagatacactccggctgcttaaatgtgcataccgcagttcataaccttttctgtctttgataatgacgtaatttccatagctgtcgttataagcagaagttgtaactgttccggtcagtcctgccatcacttttgttccctccggtgctccgatatccataccattatgaagctgatttgctcctgatattggatgaatcctgtatccataatagctggtcacactggagtaccagttaaaatcaaccggtgttgcaaacatctgcaagttgccttttgtatcgttgtaggcactgaacagttctttctggaaaaatcccagcctgtcctgacagattgacatcaggtttccactatttaaggtgacattcagcacatctacatcccttgtcctagtcacttccacttcctgacttccattatcatctgccagataacattcccatgtctgatgtccatgtgcagatgccgccgcatgattatcatagtagacgtcaaactgtaccccgtatcttgcgaaagctccggtatcttctaccgtatattcgacaccattcattaccacctttgttcccattggaacaaacggattggaagcatctaccgctaaggtgtgattggctgttggatatgctccactggcagttggtcctccgctccaaataccacagcagattggacaattacaatatccgcttgttacaacctgtcccaaagattctccaactcttactgttgctgtctctgtcacagtctcattgaccgcttctgtagtcagatgatattgctctgcaaacaaagcatccagctccggcttgacctgttcaaacgtaaactcttcatactttgctgacagataactgatcaggataaacggatcatgctcaataggtccgatgttatatcggtattcctcnnnnnnnnnnnnnnnnnnnnnnnnnnnnnnnnnnnnnnnnnnnnnnnnnnnnnnnnnnnnnnnnnnnnnnnnnnnnnnnnnnnnnnnnnnnnnnnnnnnnnnnnnnnnngttccgcttcccggattgcctgatccgatgacagataactggttcctgtgtaagtgatcacattttgtaaaaacactgcagagcatgacgtgacattcgttatgatcagaaacatcaatccgatcagaactgctacactgatatacactttccggttttctttaaagaagttggtcactttgccgccaatcttcttgatataatcaatcgtaccttttgcagctgttcctactgtctgttcacttcgcttcgctttggcataatcccgtttgatctgttgcttctgaatctgctttttcagcttcttctgctcctgacgggctgccgcctgtgtctgtttctctacctgtctctccagtctgcttctctttctggaagccctctgtttccttcgtctggcacttctctgttccagccggtaaataccttcgccgccttcttccaacttatgggcaccttctaccgccgcattatcgtcttcatttttgctgatctcacggtgcaatgctacggaagttgcacttcctgctttcttgacaacagaagctttttctgttttcacagattccccttcaccaaacttcaaacgggattttttctttccaggagattctccttcatttgcctgatagacctgtgctttcttggaatgctgctttgcttcctttctctttcttgcttcttcataagaaaactttttggctttttctttctgtttctgatggcggaaattgactccatccgtatccatctggttcaatttctccatatctttgtcatttttcacagaagcaccagtttcctcataagcaaacttcaaacgttgtttttgtttaggctttttgctgccaccggtctgatttctccggctgtctcccctgttttctgatagatcagcacgtttatctttcagtctccctaactgtccgacttcggatttttctgcaagtctggattcttttccgacttcagcacggattctttttctattttgctgcttactactctgtccaaaatccccactttgcttctctgtccgtatcagttccggtgcatctctggatttttgcacagagggacgaatatttttcccactccgttcagactggcggggagacttatccacaaggttttcttctttttccccctgttttcttcccatctgcacatcactggcacggttactgacacgaacagaagatttatctgtcaggttttcttccaccagaccatccttggtcatcttttggactttcttgtccctgactttcattctctgttctgccactacttactcctccttcttcggataccctttccctgcctgtaataagcagagaaaagcgatgccgaaaacagcaccgccactaaaagttaatacatatgaaattgctcgtaacattgttttctcctttgatttaacctgcttcggaagtctcctctaagcgggttgtcatgattttatagagggaattcttcgggaatctgtctacaaatgggataatgacatttccatagaacaaaagtccttccccctcattactgttggttacataggacagctgggttggtgagatattcagctgctttgccagaatctgcctgtctccggaagcctggttcagcatataaataaaatctgaattttcaaatatattctctatctccctggaagacaataaatcttttatattctgggtgattccagttggaataccaccccatttacgaaatctcttccatatctccacactataagctgcggtctgctcttccttcaaaagaagatggaactcatccacatagtatctggtggacttatgagcagaacggttcattgttaccctgttccagacctgatcctgaatgacaagcatcccaatctttttcaactgcttaccaagttccttgatatcaaagcagacaatgcggttattgatgtccacgtttgtctgatggttaaacacattcaaagaacctgtaacatagatttccaacgaagtggccagtcgctgtgcttctggctcttcctgttttctcagaaggttatataaatcctccaagattggcatcttctccggtactggatcggcaagatattcctgatatactaaccgcacacaacggtcaatgatggtcttttctaccggctccagtccattctttcctccaacaatcagctcacacaaagacagaataaaatctgctttcagtgacagtggattatcttcctcggaatagttcaggttcagatccattggattgatatactggtcagatactggcgaaacccgaactacctgcccatgcagtgcctgcacaagtgccgaatattcggcttctggatcacagataatgatatcgtcttccgtgatcaaaaagcagtttgtaatttccctctttgctgagaaagacttaccggaacctggtgtaccaagaatcagtccattcgggttcttcaaacgtttccgatcaaccatgatcatgttgttggataatgcattcaatccataataaagagcttccccttcctgaaacagttcctgtgtcgtaaatggcacgaagatcgctgttgaagatgtggtaagccctctctgaatttcaatccgattgactcccagtggaatacaggacatgagtgctgcttcctgctgataatccagttgttttaaagaacagttatatttctgtgcaattccctgcacctggaaaatattgttatccagtttctgacgcttccttgcggtattcatcaccagaaccgttacaagaaacattcgttcatttctggactgcagatcttccaacaggttcttcgcctcttctccataagtcacaaggtccgatggaagcacgtccatatcataaccggaacgtactgcccgcttctgctcttcaatcttcatcttatccagatctgaaatcttgctcttgatcatcttgatcgcagaactctggtcaatggactggatatgaatgttaacattgatgctgtcatccacatccaggaaatctgcaagcatccggtctgtaagctccggtgccagaatctgcagataactcacacttcccatcgttcttcccatcaaaaatgtctgattcttggaaaagttaaaggaagtcggtgcaataaaatctttggtctttaatcctgtttccggaagcatcttatactggaacttaaatggttcaatccgatcctggttgaacacatgatacagaatctccagcctttccagaccattcagggaatgcgcctgtgctcccaaaaccttaaagttatttaagatatctgtttcgattctttcaagccttggtcttgccaccttcaggttttctgcttcgattccaaaagtgatatactttgtctttaccagaccattatttcctttggaaagctgatttttcagcatagtacggtactcttcacgaatggcattgaagtcatcgttctgatccggaatatcaatacttttttcaaattctgccacatccacctgctgattgataaaggacagctgcacactgatggaagaatcaaagtaatttaagaaatcacagtaattttcaaatatcgtggtcttatcctcatttagagcaagctgatagttgatgtcataaaactgaatcgtcttggagaaaaaggtctttgtcacctggcagataccatcctgcagcatccgaatatacggaatactctgctgtgcagttgtaggaatgtttttctgtttcctacgatcccgttcctgcttctttctacgcttttcctgttctctttcttttctgctttttttgtttcttctttcctgacggtttcttttttccgccagggacagacgctcctgctgagcctcctgctttgtcttttttgccatccggcacaccctcctttttcacaagggtggaaatctcctgataaaaattttctgtcttatatggtcttactgccggacagataaacttctgtcgaatgatatttgccaccactttttcaaagggaagaccgtctttttcatacattgccatgaagaaaaacggaagcatgatcgttaccatcaggatggctgcgatactggaaccgattggttttctcatgaccagataaaacggaattcccacaactgcggcaagtgaaaagaaaatcagctgccgctttgtcagatttaacgctacttttgttttgaccttggtaaggtcttttggtactggtacatacgccatggtatgcgctccccctccaaatttaaaaacaaattcagagggtaatttagggtataacaaaataacccacccgaatatcgttttttttatttggtgagtttgttctttcaaatacgaaacaaaaagagccgatgattcgtgaattgttccacaatttcatcggctctgcgtcttaagcgtctggctctttgatgacagttatcttcaagttgtcaactttaatcaatctttcttgtctgcattttggacaataaaggggataattctgctgatgacgtatatgcttgctggaaagcaggtgcagccatcgcgcatcttcatatgagagatgacaacggcaacggtacaatggacaagaataaatttatcgaaacagtgaacctgatccatgaaagatatccggactgcgatatcatcctgaacctgacaacatccggtgtattatcatctgatcatggttgtaaaataccgaagaaaagtaatagatgatccgatttcggaacgtgcaaaagagatctgggaacgtattgcacctgattatggaatcacactggaagaatggaatcatgatgttgatcatgtgcatgttatgtttcgggcacagccaaaatcagaactcagtaaatttatcaatgcgtataaaagtgcaagcagtcgtttgttaaaaaaggaatatcctaaagtgtaccccttgtcaaggacaaattaagaagaagggatttgttctttctagccagtagatggctatatcagtttgttttattaccttcttcatcatacatatccgtagaagggatttttcccttaatcggatatatgcctgttgttatatatttatagtattcattgggagaaagcttcgctaattcccactgatatctatcattgttataataatccatccaatcgtcaataatagcacgaacctcgctatatgttccacattcttttagcctgtctcctatatgatccttcatacgtccaaagaaactttcctgaggtgcattgtcccaacaatttcctcttctggacatagactgtcttaagcctttatctttgacaagttgtataaaactgcaactcgtataatggcacccttgatcactatgtaagattgttttagttgtaagggaaactccgtgcttttctatcatcaggttgactgtttccaaaacaaaatccacttctaaagattcgcttaacacatacgataaaatttgttttgtaaaggcatctataattgctgatagatagcagaatcgaccatcaaatggaacataggttatatccgtaagcaatatccttctcggaccatatttttcaaactcccgtttcacaagattatcggcaacgttattagtttttattgcttttgccattcttctgtaaggatttgcttttcttatgttacacataagaccatatttcttcatcaatcgtcttattttcttgacattcataacaactggtggattcatatgcaacaatctcatatagattccttgagcccctttgtcataacctctgaagctatatgcagctaataccaattcaaaatcggctctatcctgtgcttctttttctgctcttttatccgctgaatgtacccagttgtaataaccggatcttgatactcctgctatttcacagagcatcttaactgacaatgtattatttgctttatttatcgtctcatggatgatttcaaatttgctttctgaagtctccatgactaatctctcttcctcgaattgtccgcaataataattttttttaaaaactctacttcttgtcttagatacaaaagctcgttctgcatacgttctatggattgcggtgacgacaaatcctcttcatttgttgctttcataggaattcttttttgtctgttttcgccctcggtaaagccattgcccgatagagcctgacgctttattctttgcacaatgtcatctatctgtttttgtccaaagtactctagattatatccaaaatccagaagaatttttcttggagcgttaccagcctgatagctgatccaaaaatcctctttaaatttagctgtaaaataaagcttgttctttgtcacattaagtgtgtacgggttagctttgagttccttaatttgtttcggtgtgtattctttcatatttcctccgatagatacttttattatacatcatctaccagaagaaatcccttcttttattgtccactaaccaggattttatcccttcttcttgtgtccatttttaaggaacccttcttcttatcgtgtccattctatggggtatattttattatcattcaacatctgattatataaaaaacgacagcagccaaatgttttggcgagcaggacttcctgttctctgtttgggtatatacgaaaacggtaagctatattcatctttttttctctccctgcttctcgttcaagaatgcctcggcattcttgctgggaaggaagcattctggagtcaaagtttctgcctgttgacagcgggtggtgcaccgattgatgttatccgtagttatatcagctgggagtcaatcccccagctgatatagcctccggcaggattgcagaggtgcgcagtagaagtatgtcatgcaattgcatgacgcgcaccttgcagcaagaatgccgaggcattcttgaacgagaagacaacgcgaagattgacttctccaacgtaaaggttgagcctttatttgaagaagaggttgatttcgatacattcagcaaatctgatttccgtgccgtaaaggttaaagagtgtgtagcagttccgaagagcaagaagctccttcagttcacactggatgacggaacaggtacagaaacatcgtgaaattgcagaaaaatattgcctgaaatctgtaacaataagtatggaaccatccggaaagtattatgcaagtttattatatgaaaaatctgactgtgaaaaccaagcagaagaatttgattatgaagacgcaaagatactaggaattgattatgcaatgcatggaatggctgtgttttctgaagatatacagaaggaaaatgaaggatacttcagaaaaaatgaggagcggctggcaagggaacaaagaaagttatcccattgcgtgaaaggaagcaataattattaccgacagaaaaaacttcaccaaaaatctgcttcagctctgctgtggtatgcaggtaaatatattccgacgtgtcgggcagggaataggcttcaatgtagatttctcgcaggttctcattcagttcagtcagtgtcagttggatcgccgtttccaccgcataggcgtaaaccggcggcagcttgctgtctgcaatgcttcttgccacgccgaactgtccgccgaacatcgtttcggtcaactccagcaaaattctgtccttggtaggaaacagattcaaatagcttccccttgccacacctgcctcgtccacaatctgactgacagtggtgtttttatacccctgctccaaaaagagacgtcataatacatcaatccgcaaaaaaccaaagcaaagattataacccatgcagccattccatgtgtatcctgatcactatatatttttaattgtacgttctcctcttccgaataccctccagatctatccatccttttttcctcctattgttctgcttctttttcatagattttgcggagcgcataccatggcgtatgtaccagtaccaaaagaccttaccaaggtcaaaacaaaagtagcgttaaatctgacaaaacggcagctgattttcttttcacttgccgcagtagtgggaattccgttttatctgttcatgagaaaaccaatcggttccagtatcgcagccatcctgatggtaacgatcatgcttccatttttcttcatggcaatgtatgaaaaagacgggcttccctttgaaaaagtggtggcaaatatcattcgacagaagtttatctgtccgtcagtaagaccatataagacagaaaatttttatcaggagatttccacccttgtaaaaaaggagggtgtgccggatggcaaaaaagacaaagcaggaggctcagcaggagcgtctgtccctggtggaaaaaagaaaccgtcaggaaagaagaaacaaaaaaagcagaaaagaaagagaacaggaaaagcgtaggaagaagcaggaacgggaccgcaggaaacagaaaaatattcctacaactgcgcagcagagtattccgtatattcggatgctgcaggatggtatttgccaggtgacaaagaactttttctccaagacgattcagttttatgacatcaactatcagcttgctttaaatgaggataagaccacgatatttgagaattactgtgatttcttaaattactttgattcttccatcagtgtgcagctgtcctttatcaatcagcaggtggatgtggcagaatttgagaaaagcattgacattcctgatcagaacgatgacttcaatgccattcgtgatgagtaccgtactatgttgaaaaatcagctttcaaaaggaaataatggtctggtgaagacaaagtatatcacttttggaatcgaagcagaaagcctgaaggtggcaagaccaaggcttgaaagaatcgaaacagatatcttaaacaactttaaggtcctgggagcacaggcacattcactaaatggtctggaaaggctggagattctatatcatgtgttcaaccaggatcggattgaaccatttaagttccagtataagatgctgccggaaaccggattaaagaccaaagattttattgcaccgacttcctttaacttttccaagaatcagacatttatgatgggaagaacgatggggagtgtgagttacctgcagattcttgcaccggagctgacagaccggatgcttgcagacttcctggatgtggatgacagcatcaatgtcaacattcatatccagtccattgatcagagttcagcaatcaaaatgatcaagagcaagatttcagatctggataagatgaagattgaagagcagaaacgggcggtacgttccggttatgatatggacgtgcttccatcagaccttgtaacctatggagaagaggcgaagaacctgttggaagatctgcagtccagaaatgagagaatgttccttgtgacatttctggtaatgaataccgcaaagaagcgtcagaagctggataataatattttccaggtgcagggaattgcacagaaatataactgttctttaaaacaactggattatcagcaggaagcagcactcatgtcctgtattccactgggagtcaatcggattgaaattcagagagggcttaccacatcttcaacagcgatcttcgtgccatttacgacacaggaactgtttcaggaaggggaagctctttattatggattaaatgcattatccaacaacatgatcatggttgatcggaaacgtctgaagaacccgaatggactgattcttggtacacctggttccggtaagtccttctcagcaaagagggaaattacaaactgcttcctgattacggaagacgatatcattgtctgtgatccagaagccgaatattcggcacttgtgcaggcactgcatgggcaggtagttcgggtttcgccagtatctgaccagtatatcaatccaatggatctgaacctgaactattccgaggaagataatccactgtcactgaaagcagattttattctgtctttgtgtgagctgattgttggaggaaagaatggactggagccggtagaaaagaccatcattgaccgctgtgtacggttagtatatcaggaatatcttgccgatccagtgccggagaagatgccaatcctggaggatttatataaccttctgagaaaacaggaagagccggaagcacagcgactggccacttcgttggaaatctatgttacaggttctctgaatgtatttaatcatcagacaaacgtggatatcaataaccgcattgtctgttttgatatcaaggagcttggtaagcagttgaaaaagatcgggatgcttgtaatccaggatcaggtctggaacagggtaacgatgaaccgttctgcccataagtccaccagatactatgtggatgagttccatcttctcttaaaagaggaacagactgcagcttatagtgtggagatctggaagcgattccgtaaatggggtggtattccaactggcatcactcagaatattaaggatttgctgtcttccagggaaatcgagaatatatttgaaaattcagattttatttatatgctgaaccaggcttccggagacaggcagattctggcaaaacagctgaatatctcaccaacccagctgtcctatgtaaccaacagtaatgagggtgaaggacttctgttttatggaaatgtcattatcccatttgtagacagattcccgaagaattccctctataaaatcatgacaacccgcttggaggagacttctgaagcaggttaaaacaaaggagaaaacaatgttacgagcaatttcatatgtattaacttttagtggcggtgctgtttttggcatcgcttttctctgtttattacaggcagggaaagggtatccgaagaaggaggagtaatcagtggcagaacagagaatgaaagtcagggacaagaaagtccagaagatgaccaaggatggtctggtggaagaaaacctgacagataaatcttctgttcgtgtcagtaaccgtgtcggtgatgtgcagatgggaagaaaacagggggaaaaagaagaaaaccttgtggataagtctccccgccagtctgaacggagtgggaaaaatattcgaccctctgtgcaaaaatccagagatgcaccggaactgatacggacagagaagcaaagtgaggattttggacagagtagtaaacagcaaaatagaaaaagaatccgtgctgaagtcggaaaagaatccagacttgcagaagaatccgaagccggacagtcagggagactgaaagaaaaacgtgctgatctatcagaaaacagaggagacagccggagaaatcagacaggtggcagcaaaaagccaaaacaaaaacaacgtttgaagtttgcttatgaggaaactggtgcttctgtgaaaaatgacaaagatatggagaaattgaaccagatggatacggatggagtcaatttccgccatcagaaacagaaagaaaaagccaaaaagttttcttatgaagaagcaagaaagaaaaaggaagcaaagcagcattccaagaaagcacaggtctatcaggcaaatgaaggagaaactcctggaaagaaaaaatcccgtttgaagtttggtgaaggggaatctgtgaaaatagaaaaaacttctgttgtcaagaaagcaggaagtgcaacttccgtagcattgcaccgtgagatcagcaaaaatgaagacgataatgcggcggtagaaggtgcccataagttagaagaaagcggcgaaggtgtttaccggctggaacagagaagtgccagacgcaggaaacagtgggcatccagaaaaagaagcagacttgaaagacaggaagagaaacaggcacaggctgcatcccatcaggagcagaagaagctgaaaaaacagattcagaagcaacagatcaaatgggattatgccaaagcgaagcgaagtgaacagacagtaggaacagctacaaaaggtacgattgattatattaagaagattggcggtaaggtcaccaacttctttaaagaaaatcggaaggtgtatatcagtgtagcagttctgatcggattgatgtttctgatcataacgaatgtcacgtcatgttctgcagtgtttttacaaaatgtaatcacttacacagggaccagttatctgtcatcggatcaggcaatccgggaagcggaattgtattatacacagctggaagctaatctgcaggagcggatcaacaacatggaatctgaagaaccgggacatgaggaataccgatataacatcggacctattgagcatgatccgtttatcctgatcagttatctgtcagcaaagtatgaagaatttacctttgaacaggtaaagccagaactggatgctctttttgcattgcagtatcggttagaaacagaagcagtcaatgagactgtgacagagacagcaactgtaagagttggagaatctttgggacaggttgtgaccagtgggtattgtaactgcccaatttgttgtggtatttggagcggaggaccgactgccagtggagcatatccaactgccaatcataccttagcggtagatgcttccaatccgtttgtaccaatgggaacaaaggtagttatgaatggggtcgaatatactgtagaagataccggagctttcgcaagatacggtgtacagtttgatgtctattatgacagtcatgcggcagcatctgcacatggacatcaaacatgggaatgttatctggcagatgataatggaagcaatgaagtggaagtgaccaggacaagagatgtagatgtgctgaatgtcaccttaaatagtggaaacctgatgtcaatctgtcaggacaggttgggatttttccagaaagaactgttcagtgcctacaacgatacaaaaggcaacttgcagatgtttgcaacaccggttgattttaactggtactccagtgtgaccagctattatggatacaggattcatccaatatcaggagcaaatcagcttcataatggtatggatatcggagcaccggaagggacaaaagtaatggcagggctgaccggaacggttacaacttctgcttataacgacagctatggcaattatgttgtgatcaaggacagtaaaggctatgaactgcggtatgcacatttaagcagccggagtgtatctgcaggagcatccgtcacgaaaggtgatgagatagggcttgtaggaaatactggaaattctacaggaagccatcttcacattgaacttctgaaaaatggagagcggttaaacccgatcttttatctggaaacaggagaaggggcaggatttggcggcaatgaatataccagtgaagcagcacagcgtttgttaaatgaagcagcgagatatcttgggacaccgtatgtgtggggtggatattcgccaagtggatttgactgttctggattcgtaagttactgcctgacacattcaggtgtaaggaatacaggaagattaacggcacagggattgtatgacatttgtacgccggtatctcagtcagaagcacagccaggagatctgatcttctttacaggtacttacgatgcaggagttccggtaacgcatatcggaatctatgtgggcaatggtcagatgatccattgtgggcatccggtgcagtatacgtccatcaactctccatactggcagagtcatttctatggattcggacgatggtaaggaaaagggcggtgtaacagccgtccggaaaggagaagcgatgaaaagtcttgaaaaagcaacggcagattatgagaaagccaaggaaaaaatggaagcatccaaagccagatatgaagcagatttaaagcgtttcaaggctgcggagatagcaaaaacagaagcggaaaatctggaaattgtaaaaattatccgtgcaatggatatgagcattccagagctggaagctttcaaaaagagaatgaaaaatgaactgcccggcagggtagaaatacagaaggaggaaacaaggtctgatgatgaatttagagaagatgaaacagaagaaatctaaaaatagcgtgaaaaaaggattgcttgcggcaacaacgattctttgcttgacatcgcctatgttgcagacacagagtgtgttagcggcagagaatacagcacccgcaattacgattgaaaagccagatggctggagacagggggaaacggcagtcgcaattactgtggatgccagtcatatgccagaaggattttctatcacaaaaattgaagcgaaagctgggaaagacggaagctggcaggatgtgacagggaatggaagtatttccattactggtaatcagacggtctatgtgcgtgtgacagatggtgaggggaaggtctatgagcagaatcgctctattaagtgttatgacacagaaaagcctacgctttctgcatctctgacagatggtgtactgacgattcagggaaatgataccgtttccggcattacttctgtgacagttaatggcaccacttatacagatctgaaggatggaatgctgagagtgcaactgacacagaaagattttacaacaaaacagattgaaatcacggtaacggatggtgccggaaatacttctgaaaagtatgtgttgcagaatccttattatgaatgggcaaagaagcaggcagagaaacagaaaacttcaggtgacagcaatggtgcgatggcaaccacgaccagtgcagatgcaactgggactgagaaaacaacgacttcaccacttccgcaggatgcacaggcttctgagccaacagatgcaaaaggaactgtggatgatcggacagtgacaggtattgaggaacagcttaataaagaaggcgagacagcagattctgttaccaaaacagctacggaaggcacaaaagagttttataccatttcaactaagagtggtaagattttttatctgatcatcgacaattcaaaatctcaggataatgtgtatttccttaccgaagtcagtgagaaagacctgatgaacttcacactttctgattctgtgacacttccggaagtagatattgtttatgcagaaccagagaaacaggctgaagaagaaaagccggaaacgacagagacagatgagaaagataaggtagaggatgaaattcagatgccagaagacaaaagtttggcagggacttatctactgatcggattggttgctgttggagctgcggcaggtggttattacttgaaagtctacaaaccgaaacatgaatatgatgatgaagatgagatggaagaggatgaaaatgaatccgaagattcagagtcagaaaaacgggaagtagacgatgcagatgagcaggaagaacaggaaaatgcagggacagaagttttgaaagatgaagatttcaatgatgaggtactagaagatgaagaagaggagcaggagtaaatgaaattagtgattgcagaaaagccatcggttgcgatggcactggcttccgtgcttggagccagaacaagaaaagatggctacgtggagggaaacggttatatcgtttcctggtgcgtaggacatctagttggattatgtgatgcatcggaatacgatgaaaaatataaaaaatggagatatgatgatctgccgattgtgccagaatgttggaaacataaggtattggaaggtacgaaaaagcagtttggaatcttaaagaaacttatgagagattccaaagtagatgaagtgatctgtgccactgatgcaggacgtgaaggtgagctgatcttccgtctggtgtatgagcaggcaggatgtaaaaagccgatgaagcgactctggatctcttccatggaagaacaggcaattaaagatggatttgcgtcattaaaagacggttcgtgttatgacagtctctatcagtcagctctttgcagggcaaaggctgactggctggtgggaatcaatgcgagccgtcttttttctgttctgtataaccagaatctgaaagttggaagagtacagacaccaacacttgccatgatcgtggatcgaaatcagaagatnnnnnnnnnngaaatattatatggctcatatcaaatttgacgatatggatgcggtcacagagaattttcagaaaaaagaagatgcagataaagtggctgcagagtgtcaggagcgcatgtgcgaagtggagaaggatgatgtgaaagagaaaacggtccgccctccgaagctttatgatctgaccaccctgcagagggaagctaacagaatgtttggctataccgcacagcagacattggatgctgtgcaggagatgtatgagcagaagcttgtcacttatccgagaacagacagccagtatctgacagatgagatgggagaaagtacagaaactctgattcagatgttatttgggaaaatgccttatgctgaaggtctggaatatcaaccggacgtgagtaaggtattaaattcaaagaaagtatccgatcaccatgcgattatcccaaccatggaagtagccaaagcagatattggtgaactgaaagaacgaagccgcaagattttgtatttgatcagtgccagggttctgacagcaactgcagatccttatatttatgagagtcataaatgtcagattacctgcaattatcatacgttttatctcaatgcaaagaaaacaaaacaggaagggttcaagacaattgagaaaaaactgaaacagttctttggaatcattgcagaaaaagaagagccggagttggatatctgggcaggcaagcattatggtccctgtgattcttttgtatcggagcattttacacagccaccgaaacagtacacagaagataccctgctttctgcgatggaacgtgcagggaatgaagagctgaccgaagatacagaaaagaaaggacttggtactcctgcaacaagggcagcaatcattgaaaaactgattcagtctggctttgtgaaaagggaaaagaaaaatctggtgccgacagatgatggaaatgtgctgattacggttctaccggatgagattaaatctccgaagatgaccgcagagtgggaaatggcattgaatcatattgcccagaatacagagacagcagatgaattcctaaatgggattacagagctgatgcaggaactggttgccaggtatcaggggatttcagaagagaagaaaaatcagtttcagggaaaggcaaaaggagaagtcattggcaaatgtccccgctgtggagcagatgtcagggaaggaaaagtaaatttttactgttctgaccggaaatgtgcttttaccttatggaaaaatgataaatttcttgcaagccagggaaaaaagatggataaggtggcagcaaagaagttcctgtctaaaggaaaaatccattataaggatctggtatcaagaaaaacagggagacagtatgaagcaactgtggagatggtcgatcccggagagggaaatgtacagttcaatcttatttttccacaacgataagtagtgtattgcaggcagtctaaggactgtctgttttaatacaaatatatgaaagagaggaccttagcatgaagaaaaaaggtaattttagaaaagtagtatctggcttgctggcaggcatgacaatgcttagtacagtgctgtctccgatgacggcatatgcagcggagatccagccagaggaaaaacctccactttatgaggaagtgaaagaccttctggatgaagatgaggtggtgactgccaaagattatgaaattgaaacaggcagtgtatttgatgtgaaatcagattacacgggactggaaatcaaggatgataacaaggtcaaagtcacatttgaggaagcaaagaatgacaaggatgaggattttacgacagatcatgcggacacttacaaagcggtctattatgtggaaccggtaaatcaagagcatccgaagtaccagatcagccgaaaactgattgtgcgtgagaaagcaacagaagctcagactgaaactgcagggagtgaagcagtgaccgaatcagaaaccgctggcagtgaacagcagacagaggaagcggaggattcagaagcagactcggagattaacgatattgacgctgatgaatttgatgatttagtagagcaggcacagaatcaggatacctatgatgaagaatcagggttagagcttcatgatgttttggaacaggcaggagacgaaggtgtggatcttgatgctatggaagagggagagattgcaacatttgaagcagtttcagcttattcagcaagaagtacacagcaggtaacaattgaaaaaggaccactgtatagatatgcagattataatcttggaacctatctgacagagccgtactatatcagctacggaaacgtcagagcaattgcgtattgtgtacagccagctaagccaggacctggatctggaaattatacaattacaaagattggagacaatcaggcgttagcaaaagtgtgttattacggcacagatgccgcagggagcgaaagcttttttgcgaataaacacacggatttttcagaaggaaaaagattcatcatcattcacatggctgcatcatatgccaacggaagcagtgatgcattttacggaaccaatgctacaggagaggctttggcaaaagaactctataattattgtgtgaataagccggaaataccagatgtagcgatgtcattttcaaagccggatgtaaaagcttatgtagatagaaatgttcagagaacggagaacattaagttcaacgcatcttcccagcagaaaatcacaatggacttaccaaaaggagtaaagctccataatgtatctactggaaccgtaagtgcggcaggtgcaagcgtaacaattggaggaggaaccacgttttatctctcagctcctctgacacagacaagagatgtaagtgatactttttctgcaaaaatgaagggaagtattacaaaagattattcagcatataaattgactacgaatgcaagtgttcaggatctggcatttgtatttggagaaggtgttgctgatgaaaaatatgtaagcttaaaggtgtcatggattgaacaggctacgatcgaaatcgtaaagaaagacgatacagcgaatgtcaatcttgcaggtgcagtatttggcgtttacagcgatgaggcttgtacaaagctgatcactcagatgcctgcaacagataagaatggaaaatcctctgttacgattatcaagacacaggataccgtttatctgaaagaaatcacagcaccacagggatatgtagtaaatgcaacggcaacaaatgtaaaactggtagcaagtaagacctcagctgtaaccgtggaaaataaggagcagcttgcagagcttactgtttataaagaaggtcaggtgcttaccggagcagaagtcagtgagagtggaaccgtattccattatgagaaccgcagacaaaaaaatgctgtttacaacgtgtatgccggagcagatattgtgactgcgtatggtacaaaagtgtacagcaaaggtgatctggtgaaagaaaatctgacaacaggtgagaatggctctgttaccctgaagaatctccatctaggaacttatgtggtaaaagaagcaaaagcaccggacaacttctataatggcggcgaagaaaagacagtgacgctgacttatgccggacagaataaagaagttgtatttgcggatgtcaccttcaacaatgagcgtcagaaagcagaagtcactgtagtaaaacaggataaagatacaaagaaaccgctggaaggtggtattttcgccctgtatgcggcagacgatatcaaaaatgcagatggtgtagttgttgtaaagaaaggcaccctgattgagaaagccactaccggtgaggatggaaaggcaaaattcacagcagatctgcctatcaatcattcctattccgtaaaagaagaccaggcaccagaaggctatgtaagaaatacagaagacgtgtatacgttcaagttctcttacaccaatgataaagaagcaaccgtatctttcgcccataccttcagcaatgaccgtgtgacagcaaaaatcaatttattcaaagttgataaagaaacaggaaaagccgttccgcagggcgatgcaacactgaaaggtgcagtctacggattatatgcccgtgaagatatcgtgcatccggatggagcaaccggtgtgatttataaagcaggggaacaggtggcttctcttacaacggatgaaaaaggacaggcttctgtagatggcttatatcttggcaaatattacgtcaaggagatcacaccaccgaccggatacctggcagatacagaagaacatgatcttgaatgtagttatgaaggtgatatgactgcagaagtaaaaagagaatgcatttccagtgaacaggtgatcaagcagccgttccagattatcaaagcagccaacaatggaaagaccgatgcagatctgttatccggagccggatttacagtttatctgaaatcttcccttacaaagaaagcagatggaagctatgattttgattctgctaaaccagtagtgagtggagaaaacggagctactgagatttttacagatgaaaaaggttatgcctgcagtattccattaccatttggaagctatattgtccgtgaaacaacaacaccacacaattacaagccagtcgatgattttgaagtgaatatcacagagaaccatccgaatgagccacagatctggcgtgtgcttctggacaaagagttcaaggcaaaattgaaaattgtgaaaaaagacgatgaaacaaagaaatccgtcctgattgcaggaacagaatttaaggtatatgacctggataacaaaaaatacgtggagcaggtaactacttatcctgtgacaaccacacacaagtcctattttacagacagtcagggttatctgatcatgccaaagaacctgaaaatcggacattaccggattgaggaagtcaacgcaccggaagggtacacaatcaacaagaattatatggagattgctgttgatgcaaacactgcttatcagatggattcagaaagcggcgatgccattatcacagttgattacgagaatcatccggtaaaaggaaagctgacgatctataaaaaaggtgagatgctgagtggattcaaaaaggattttgtttatgaagaaaaatatctgaaaggtgcagagtttaacgtctatgcagcggaaaatatctacacaccggattatcagaaagatgaaaatggaaacagacagctgatttatgcaaaagatgctctggtaacaacggtaacgaccggggaagacggaaaagcagttgcagataacctgccgcttggttcttactatgtggtagaaaaaacagcaccggaaggatttgttctgaaccatgacagatcggatgtagcatttgtctatgcagatcaggatacacctgtgatcgaacaggaagtgactgttggtgatgacagacagaaagttgcaatccaggtagaaaaacaggatgcagaaaacggagcaacggtagaaggtgcagtctttggcatttataacaaagatgatatcaaagcagaaggcaaagtcattgtcaacgctgataccctgttacaggaaatgacttctgataaagatggaattgcttcctgtacgctggatctgccactcggacagtattatgtaaaagagttaaaggcaccggcaggattcgtttcttccgatgaagttctgaatctggatgcttcttatcagggacaggacgtgaagacagtaaaactgaaaacagtgaagaagaatcagccgacaacggttgaaattacaaaatcagatgtgacaacaggtgtggaactggatggagcaaaactcaccgttcttgatagagaggggaatgtcgtagatcagtggacttctgtaaaagaccagccacatgtgattaaacgactgaccgttggggaggaatatacccttcgtgaagaaatcgcaccgtatggatatctgaaagcaacggatgtgaagttcacactggaagataccgcagagattcagaaggtagagatgaaagatgaagtgccgacaggacttttaatcatcaacaaaaatggagaatttttggataaagtgacacttctggacaatgtaaaaggcactgtggagcatctcttcgaatatgtaaccggaagccttacagatgtgactttcgatgtatttgctgcggaagatatcaaagcggcagatggtgtcagcaaagattattacaaagcagatgaaaaagtaggaactattactacagattccaatggtattgcacagatggataatctcccggcaggcaaatactatgtgaaagaagttaaaactgcccatggctatgtattggatggagaaccgagatatgttgatctttcctaccgtgatcaggacacaccggtaatcacttatgatgaaaaatggcagaatacccgtcagaaagtaaaggttactgttctgaagaaagaaaaagatacagaccgtgttcttgcaggcggcgtcttcggcctttataccagtgaagatatcaaaaatgtaaacggagatgtgttgcttgagaaagattccctcatcgagcagaaagcaaccgatgagaaaggacagatcacttttgcggcagatcttccagtagatggaaaatattatgtaaaagagaacagtgcaccggacggatttgtgacaacggaagaagtgcaggagtttacctttgaatatgccggagaagatcaggcagaagtaagctatgattttacgtttgaaaatcagccgaccacagtggaactgacaaaaacagacctgaccacaggcaaagaacttccaggtgcacacctgaaagtgacggatgcagatggaaatgttgtggatgaatggacttctacagaaggatctcatgtgatcaaagaacttgttgtaggtaatgagtataccatgacggaaacaaaaccggcagacggatatgttactgcagagagcattacctttacggttgagaatacagctgagattcagaagcatgagatgaaagatgatgtgaccaaggttcagatcagcaagacagatatcacaggagatacagagattcctggtgcaaaactaacgattcttgataaggacgatcaggtagtagagagctggacttccacagaggaggcacactatattgaaaaactgccaattggtagatacaccttacgagaggaacaggcaccaaaaggatatcttctgacatcggatgtgacatttgaggtgaaggatactggagaaatccagaaagtggttatgaaagatgatactgccaagggaaaagtcattctcaataagacagataaatcatctggggaaccgctgaaaggagtagaatttgaattccgtgacagcaaaggaaaggtcctggaaaccttaaaaacagatgctgccggtcatgccgagagtaagctgtatgagattgccgcattcaagaacggcaaatatgatacagcaatcaagtattatctggtggagacaaaaacactggatggatacacactggatcagaccaagcatgaagtgacatttgcctacgcagacgacagtacgccggttgtagaagttactttcaatctgacaaatgagaaaccggaagttccggaaacaccaagcacaccagatgtgccgcagtcccatgaagagacgaaggtatcagatgcaccgaagacaggagataacacaaatatctggctgccgattctgcttctgcttatctctaccggaggcatggcaggactttatatcagcagaaagaaaatcagaaaacagtaatcctcagtaaagggggccctgaatcagggctccctttaaaatacaaaaattcacagaaagggacagaaaaatatgatgaaaacaatggaaaagagacaggaagcaagaaagaaccaggagagaactttaaaaagaatgatggcttatcagaaaaaagccgagcagatggtcagcaggaaaagaatgaaccatcacatgatcagaaaggggtaaaagcgtatgatgaacagaaaagaattttatgaatatgtcaaagataatgtaaaagactatttgccggattcatatcagaatggagaaatccgtattgaagaagttgcaaaaaataatggattaaggttgactggcatttcaattccacagggtgatcaaagagctgtgccgatggtatatctggattctctttatatggaatatgtcaatggaaaaaatctggattcctgtgtgggtgatgtggcagatatgcgtattgaagtgcaggacaaagcggcatttatcaatatgggtcttccggatattttggattatgaaaaaatgaaggacaaattacaggtgagaatctgtgaccgggaatggaatgaagaacgcctggctgataaagttgttaccgaacatggagattttgcagcatattacgcagtgaatgtggaagaaaacgagggaggaattggtagtattccggttactgtcaatcttatgaatgaatggggtgtgacagcagaacaaatccaggcagatgcagtggcggcagacagaaatcgtggtgttgttttgatggacatgaatgaaatgataaaatccatgatttttggtgaagaagcagaaaatcttttgaatgaaaaactgaatgttgaagcaatggaaaatccaatgttctgtctttcaaatgcacaaaaaatgaatggtgcatcactgttactgcaggaagatattcgtaagcagatcggtgaatgcctgggaagtgattattttgttcttccctcttcaattcatgaggtgctgattcttcctgataacggaatgtttgaagtaccggaattaaatgccatggtacaggaagtcaatgagacgcaggtagagaggcaggaacagctttcggataaggttcagttctgtgatggaaagacagcagttatggaaaatgccgaacgcagggaagcacgtctggagaaagaaaaagcagcagaaaaagcaactgggaggacagaagcaaaaggtggaatccatggaaaactggagaaagccaaggcggagatcaaagcaaaagggacagatacaatcccaaagaatagggcgaaagaccttgcctcagtattataacgagaaataacgatgattttgaggggactgtgtgagcagtccctaattttatgaagatggaggagaaaagaatatggactggtgtttatatggtgatgataaaagaaaggaaatggatagagatttaaaaccggaatatcttttggatgacttacggagatatcaggatgtatttggtgaagaatttggtgtaaaagagcttcttatgctggaggatatccgggtaaaggctatgattgccggagcacttgcagatatgccggaatttcttattgatcagattggaaaagcaagtaacagtagtaattttccttctatgacaagggcaatggaacggattgccgatgttgtagaagaaaagtgggaagaagaaagggagtaacagatggcaaataaattatatgcaatggaacttctgacggaggaagtggcaaaggatgttgctgccaatccgcaggaatggatgcggtttctaaatactgcatccaggctgtaccggtacacttttccggaacagctcttgatctatgcacagcgtccgggagcaacagccgtggcatccatggaaatctggaaccagaagatgtaccgatggattaaaaagggttctaaaggaattgccctgatagataacacatccggaccaaaaacgaaactccgatatgtttttgatgtgcaggatacttataaggtaaaaaatctgggcagagatccgcagttatggaatcttaatccagaaggagaacaactggtggcagattatctgcaggagcggctggcactggaagcaacagagggaggattagcagaggttcttcaccaggcggcagaagaaagtgtgcaggcctggttgccggatgctttcgacgaactgcaaatggatgtagccggcacttttctggaagatctggatgaacagaatcagaaagtggagttccgggaactgatgacaaacagtgtctggtatgtgttactgaaccgatgcggactggatgtgcaggaatatcttgatgcagaggattttcgtcatattacagattttaaccagttaaaggttattggacaccttggaagttctgtgaatgagatcagcagaccggtattgatgcagattggacgatatgtgttgaatgacttggaaaaagatctgaaaacggttgcaaaagaaaaagaagtagcttataatgaatttaacacgttaattcgtgaaagcaaaacaaggaacacagaagatagaggagaaaataaggaggaaacagagcatgagagagatcacttacagccagaatggagagtaccagattccggatatcagtctggaggagacgagaggaacgatcgggaagtacggattgatgaggaaagagtatctgagaaaccacaaagtagccagattcaacattctgaccttacagaaccgtctggacagtcatctgatggaaatcgacagccaggcaaggcagagagtagacaacctgatgtcagaacttctggagaaaaacccggcaccggacaaaatggcagacgggatggcatggaccagacacatgaaccagatcaaagcacaggcagaggaactggtaattcaggagattatttacaattaagtctgttcccgacagaagaggaacagttaggagaaataaggaaagcggtagctgcattagaacagccagccgcttttcttatttctgatgaagtagtagatgatattctccgcacgggaagtggacagaaaaatacactgtttcatattacggcaagactgattgaaggtctggataatgaagaaatgcagaacttcctgaaggaggaatatgaaacaggtggaaaaggatttaccatagatggacagaaaatcagtatctggtatgacaatgatggtatccgtatccgacggggagattccgccagaagaaactttgatcgcatggttacgtgggaagaagcggcggacagaatccgggatatgtatgaggatagaagttacgtggataatctgatttccaataacgccattgaacaggagcaggaagaaatgaccaatcttcttgcactccattttcgggataccagcagaaaccgggaggagcagcaatcatattcggattggcaggatgtcgtgcgggaagcttggacagattcagcggaagcagatgcaattgcccatcgctttgaatggctgcagaaagatatggatgagaatccagaagattatcgcaggtgggagattcagcataatccggaatatttccagcgttttcaggatctccagagggagcgttcctgggtagaccagaaatttacggtcgaacgtccggccctttcctttatcacacaggatgagatagatgcagtccttagaagaggcgggatcactgccggaggacggaatcggatctatgagtatttcatggaacatcacgatataaaggatgcagctgagtttctgaaaaatgagtatggtacaggtggagcagcacctgggataccgggagcgtatgaatccgatgcttcccatgatgcgaaaggattaaaacttgcgaaagggaagattggcagtccagatgtagaagttctattaaagtggaataaggttgcagaacgtgtccgtcagctgattcgcaccgatgatttcttatcaccggaagaactggaaaagtatgaagaacggcaggaagcacagagacaggcggatctggaaggagctcagcaggctttggaagtggagcaggaaggctctgatcagcaggaaatacgagaggaaaatcaggaaccgtcggaggttgagacacaaccggaagcagtagaagatgcagaaaaaaaggaagatataacaccagaacagtctgatattccagcaacaaacttccatatcacagatgatgaactgggacagggaacaccaaaggaaaagttccgtgctaatatcatggcaatccagcttttaaagaaatgcgaggaagaaaaccgcaatgccacaccagacgaacaggagattttatcccgatatgtaggctggggaggtcttgctgatgctttcgatgaaacaaaatccgcatgggagacggaatatctggaattaaagacagtccttacaccggaagaatatgcagcagccagagcttctaccttaaatgcccattacacacagccaatcgtgattgaaagtatgtatcaggcgttggaaaatctgggatttacaaaaggaaatatcctggagccatccatgggtgttggtaacttctttggaatgcttcctgagaagctgaaccagtcaaaactctatggtgtggaactggacagtatcagcggtagaattgcaaaactgctttacccagatgccaatatccagattaaaggttttgagaagacagattatccgaatgatttcttcgatgtggcaatcggaaatgtgccatttggagcttataaagtgaatgacaggcaatatgaccgctataattttatgattcacgattattttctggcaaagacaatcgaccagttgcgtccgggtggtgtggcagctttgatcacaacaaaaggaaccatggataaagcatcaccggaagtccgaaagtatctggcagaacgtgccgatctccttggagccatccgcctgccgaacacagcattcaaagcaaatgcaggaacggaagtcagtgcagatattttattcttccagaagcgtgacagcatgacaaaagagatgccggagtgggtgaatcttggaagtgatgccaatggaattacggtcaatcagtattttgcagaccatccggaaatgattctgggtgagatgaaagaggtatccggtccgtatggtatggaaacaacctgtatgccgatagaaggtgctgatcttgaagtccagcttgcagaagctgtcaggaatattcatggaaatatggcacctgcagttgatgtggatgcagaactggatgatgtaccagagagtatcccggcagatccgaatgttcgtaattacagttatgcggttgtagatgatcaggtatattaccgtgttaactctctgatgaatcaggtaaagatgcctgccgctactgcagaacgtgtaaaaggtatggtggagatccgagacacggtgcgtgaactgattgccatgcagatggaagaatccgtaacagatgaagaaattcacaaacagcaggagaaattgaatcaagtatatgatgcttacacagcaaagtatggagtcatcggaagtaatgcaaacaagcgggcgttttctgatgacgcttcttattgtctgttgtgttctctggaagacctgaacgaagatggaacattgaagcgaaaagcagacatgtttacgaaacgaaccatcaaaaaggcagtggcggtaaccagtgtggaaactgcgacagaagccttagcattatcattgaatgaaagagcaaaggtggatctgtcctatatggcacagctgacaggaaagacagaagaaaaaatcacggaggaactggttggagttatatttaagaacccactgacagaccagtgggagagtggagatgagtatttatctggaaatgtcagggagaagttaaacacagcaagaacctttgcagagaatcacccggaattcacaccgaatgtccgtgcattggaagcagttcagccaagagaactggaagcatctgaaatcgaagtaaggattggggcaacctggattgaaccatcggattatcaggactttatgagggaactgcttcatactccgtggtatcttgcacagaaggagatacaggtaaaatattctgaggtgaatggtgagtggcggattaccgggaaaaatgcagacagtccaagaaatgcgtttgcctatgcaacgtatggaaccgagagggcaaatgcttaccggattctggaagatacactgaatctgaaagatgttcgtatctatgataagagtgtcaatgaaaatggggatgagattcgtgtcctcaataaaaaagaaactatgctggcatcacagaaacaggatgccatgaaagcagcatttaaggattggattttcaaagatcaacagagacgtgaaagactggtaagagtttataatgaacggtttaacagtatccgtccccgtgaatacgatggcagtcatctgactttcccaggaatgaacccggaaattgaacttcgcccacatcagaaaaatgctgtcgcacatcagctttacggggataatgtgcttctggctcatgtagtaggagctgggaagacctacgagatggtagcggctgcaatggagagcaaacgtctgggattatcacaaaagaatctatttgtcgtgccgaaccatctgacagagcagtggggagccgagttcctgcagttatatccgggagccaatatcctggtggcaaccaagaaagattttgaaccggcgaaccggaaaaagttctgtgccagaatcgctatgggaaactatgatgcgattatcatcggtcattcccagtttgagcgtatcccaatctctgatgagaggcaggaagccatgctgcggaagcagattgacgatctggaaatcgcaatccagagtgcaagatatgagcaggatggcggccgctatacggtaaagcagattgaaaagaccagaaaaacgctgatgacaagactggagaagctgaatcagaaagagaaaaaggataatgtagttacctttgaagaactgggagtggatcatctgtatgtagacgaggcacacagttataaaaatgcgttcctttatacaaaaatgagaaatgtagccggaattgcccagaacgaagcacagaaatcagcagatatgtttaataaatgtcagtatctggatgagattaccggtggaaaaggcattacctttgcaacgggcacaccgatcagcaacagcatgacggaactttatgtcatgcagagatatctgcagaacagcaaattacagaatatgggcttgggattatttgattcctgggcatccacgtttggagaggttgtgaccagcattgaacttgcaccggaaggaaccggataccgagcaaaatccagattcgccagattctataatatcccggaactgatgaatatgttcaaggagattgcagatatcaagacttcggatcagttgaatcttccagtaccggaagcggaatacgaaactgtagtattgaaaccaacagaacagcagaaagaaatcgtagcaagcctaggagagcgtgcggaagtggtaagaaacggtggcgtagatgctagtgtagacaatatgctgaaaattaccaatgacggaagaaaactggcactggatcagcgattggtcaatgaactattgccagacgatccgggcagtaaagtgtcggtctgtgcagaaaaaagctatgaaatctggaaagatacagttgtacagaaatcggcgcagatcattttttgtgacttgagcacaccgaaaggcgatggcagtttcaatgtttacgatgacttgaaacagaagctgatggcgaaaggtgtaccggaaaaagaaattgcattcattcatgatgcaaataccgaagcaaagaagacggagctgtttggaaaagtaaaatctgggcaggttcgttttttgattggttcaacagcaaagatgggtgccggtaccaacgtgcaggatcgtctgattgctctgcatcatctggatattggctggaaaccgtctgatctggagcagagggaaggacgtatcatccggcagggaaatcacaataaaaaggttcatatctttcggtatgtgacagaatccaccttcgacagctacatgtggcagttgatcgaaaataaacagaagttcatctcccagattatgacgagcaaagcaccggtcagaagctgcgaagatgtggacgaagcggcactgtcctatgcagaggttaaggcactggcaactggaaatccggcagtaaaagaaaagatggcactggacgtggatgtggcaaaactgaaacttttaaaagccaatcacatgaataaccagtaccgtctggaagatgatattgcaagaaattttccacagcagattgcaaaattgaccgagactattgatagctacaaagcggatattgcccattatcaggagcataaaatcacagatccagaacagttttccatggagatcagcggcaaagtatttacagaaaagaaagaagcaggagcggcactactggcagtctgcaaggacatgaaagcagtcgatgcagcaatggatatcggaaactatcagggattcaacatgagaatccagttcgacagctggagtaaggagtttatcctgtctgtgaagcatgaatcggtatcgaaagttcatctgggagcagatgccctgggaaatatcacccgtatcaataatcttttggaaagctatccggagaaactggcagaagcggagcaacgattggaaacggtacaggagcagcttacaaatgccaaagaggaagttggaaagccattcacaaaagaagaggaactgaaccagaaactggagcgactgtcagaactaaatgcccttcttaatatggatgaacgggaagacacagaagcagagcagtcagaatcgaaagagaaagaagaacgaccggcacgtggttctatccatgagaaactgcagatttataaagaaaaaagccagcgggaaagcgagaatggcagggaagatagaaaaagggacttcggtctggaataagaaaacaggaaagatggcataatttggtagaaagaatgttctgccggttatgccacttttgggaatacaggaggaacttatatggcgagaaacatgataacaggaatagaaacgcagaaaatgcaggaatatacacaggaacaaatagaccgtgcagaacacatgggaatagcaattccagcggacgtaaaagaacagatttttgaatatgcaaatctggttggcgaagaagagaaagtaaggacgctggtaagaaatctggcagatgcagtcaatcggtcagatgaagatagagtagaggaacttctggatgatgcccaaatggatattcaggacttaccagatccaaccataggcaagctggaacttcgggattatggatatacagcagaggatatggtgccgcttagaaaagcagcagccctggattatcacagaatgggttctaaaatctattgcctgggtagtgatggcagcaagggagagtatgcaagtaaagaaatgatacaggcacatgaagggctgtttggcatggaatcacagatgtgggaacggataagggatcaggatctggattatgcagatgaagattttggagcatttcaggagccgatgaatgtgattggacaggaagaagctctgaaattatatgatgccggagcagatatctatctgattaccaatttttcatcaccaatctatgttacagagcgaatggagattgaacgaggtccggagcattatcagatgtctacagaagaactggaacgattccgcaatttggaatgggagatgcagaaatatccgcagattcagtctttgaaagaggcaaatctgctattagggacaagacgaacattcggtatttatcaaataagagatggtttgccaggtgaaaactatgcgtttatgaatatgagcttcattgaaagtcacgggatgcagattaaaaaagaagactatgaactggtctatgtgggagaattatttggaaatatgtcgctagatgatatatttgaacgattcaacatcgacagaccagaagactttcgaggacattccctgtctgtcagtgatatcgtagttctgaatgaggggggaaaggtaaccgctcattttgtagacagtatcagttttgaacagctagattctttcctgaatctggaagaacaggttcttagtgaactggcatatgaggtaggagaacgttactttgctattcagagaacagaaggaggatatgattattccttttacgatgaagatttccgcctgatggatggtggcgtctatgaaaatggtgaaatttctattgaagaagcggcagaggaacttttggaagacgaaggatggactggagaacgcatccgtggggattatgatcagttgatggaaaaggtagaagaaatggatgaggttgtaatggcagagattcagaaaagccagggcgaatataagccattggcaaaggtagaagaactggaagaggcaaattataacatgattgataatgtcctcaataatatgccaccgaagaaagaaccgtatctggaatactttgccgcagaatgtgatgagttccatgatatgggagcttatgaaaaaagtaccgatgttaatcagattgctgcggtttatgaaaaatatagggagaatcctgagaatgcctatcgagtatgcagtatggggattatctatcgtgatccggaagacagttactatgatgatgctgaatttgcaatcgtaaaaggaaatacagtacttggaaatctgatggacgatgttcgattttatggagaacttgcactgatacgggaagggattgagaaaattcatgatgcattgccggactataagtatgtaccaatgcgggatgttcgggaagcaatgtatccagagaagatgaccacagaacagttggcagaggcattggatgagattgcagaagcttttgatccgtatgagtatcgagataatgtggagacgggagaaaatacggtacaagaggtgatgttggatttgcagagtggcaatacacattcttatatttcttatctgaaggatattgtagacgaagaatgtgaccagtctgtgcgtgcaggtgtattgattgaaagactgaaagtctatgagccggagtttccaaagaatctggaaccaatggtgtatgtaaactattgtgaagaaagtgctctcatgaatccaagatgtcagaagttatccgagctggatgcaaaaacagcagaaatggataaagaatggtatgcaaaacgtgattcgaagacagaggaacctacaaaaatcacaaagatatatgtgactgtatattatgcggaaaaaggtgaacagatgctgcatcatttcaagaagtcaatagatattggaaatggacatggcggtattgtgagtcagttgaagtatgataatgaaatgaagcttacagatgagtattggatcaattaccagaaaggtaaaggaagtgaagagttccaaaaatatatggaagatctgacagacatgcagaatcatgtgcttccgtatctgcagagcttttgcaatctggaagaaaaaggtgtgaaagagagacgagaacagcagataacggaaagaaatgaaggaagagcagatgagcggggaacaagtaccgaagcgaatgcagtggtcaaggatgcaggaaaagcagataggaaacaggtacaacagaagcaggcggtagttggaaaagataagaaattatccattcatgaacggcttgagattaataagaggattattcaagaaaagcagggaaaagataagccggagagaggggctgatcggggtgtgagataagtataatattataattctaatgaaggatgtagggagtcaatccctgcatccttttttaatgcgtaaatatggattgaacgttataatgaaagcagattggagatgtttttcttctaaccacatcaattaggaaaagagtatctgtagcagataaattcaaaaggtttgtgaataaattaaaaaagatattcaatatttgaaaaaagatatgtgatatttgtaaatgcgaattgtacaaggagttttttgtgtgataaaataattttgatattgattgcacattaaacggaggaaaagaggatggcaattagttataatggattatggaaacagttaattgaccacggaatgaaaaaaggagatttgtgtgccaagactggtcttagctccagtacaatagcaaagatgacaaactgcgagtcggtgaaactatctgttttggaaaaaatctgcaaagagttggattgtaactttggagatttgattgactatgtaccagataacaaagaaaagtaaattaccttatggaggaaaatgtaaatggctacgagaagtgcaaaaatagatcagaaagcagacctaatatgggcaatagcagataagcttaccggtgtatataaaccacatgaatatggagatgttatattaccacttacagtaatcagacgttttgactgtattctctcagatacgaaggatgcggtattacagaaatacgatgaagtaaagaatcttccaatgaaagatattttacttcgtaaggcttcaaaaaaggatttttacaatacaagtaaatatacatttgaaagacttatggatgatcctgaccacattgaggagaattttagagagtatctgaataaattttcagcaaatgtgcgggatattctggaaaaatttaagtttgatggacacatcacaacgatggcaaataaggggattctgtatattgttttaaaggaatatacaacagacagaggaaatcttcatccgaatgaaatctctaaccttgaaatgggatatatttttgaagaaattataagaagattctctgagtctcataatgaagatgcaggacagcattacactccaagagaagttatccaacttatggttaatattctcttctatgatgataatgacatcctttctggcaataatgtggcaaagacgatttatgatcctgcctgtggaaccggaggtatgctttctgtagcagaggaatatttacatagtctgaatgcatctacagagcttgtatcgttcggtcaggaaatcaatgaccagacatttgcaatctgtaaggctgatatgctgattaagggtaacaatgctgattacattaaggatggcaacacattatcggatgaccagtttgcaggcagtacatttgactatatcctttcaaatcctccgtttggacgtgagtggaagaatgaaaaggcaaaagtagaggaagaggcaaagcttggcttcggaggaagatttggagcaggacttccggctacaagtgacggacagatgctttttcttatgacagcaatatcaaagatgaaagatattgataaaggtggaagcagaattgcaatcattcataatggttccccactttttacaggagatgcaggaagcggaccttctgaaatcagaagatatattcttgaaaatgatctgcttgaggcaatcattgctttaccgaatgatattttctataacacaggaattgcaacctatatctgggtattgtcaaataaaaaggcaggtacagtcagagaaggaaaagtgcagctgatcaatgccaatgagatgttcgtgaagagaagaaaggcattaggaaataagcgaaatgatatctctaaggaagatattgcagagattacaaagatatatggtgattttaaagagagtgaaatcagccagatttatgatgacgaggattttggttataccaagattacagtagaaagaccgcttcgtgatgaagaaggcaatctggtattgaaaaagggaaagaaacagccggataccagtcttcgtgatacagaaaatgttccgttaaaagaggatatcaaagagtactttgaaagagaagtacttccatttgcaccggatgcatgggtagatgagaaaaagtcaaaggtgggatatgagattccgtttacgagatatttctataagtatgaagctccaagaccatcagcagaaattatggcagagattatggatttagagacagaactatctggaagtcttgaggaggtatttgacctatgagagagatgaaggatagtggagtggaatggattgggaagataccaaaagattgggagattgttcccttaacaaagcaattagattcaattgtcgattataggggaaaaacaccagaaaaaacagaagaaggaacttttttagtaactgcaaagaatataaaagatgggaaaatatgctatgagttatcaaaagaatacgttcgtgaagccgattatgaggagataatgcatcgaggaataccacaaattggcgatatactatttactacagaggctccattggggcaagtggctaatgtagatagaactgatattgccttagcacaacgtattataaaatttagagcattaagtactgttaataactattatttgaagtattggatgttgaacgagggattccagcagtttttacattcattatctactggttcaacagcaactggaataaaatcaagcaagttatttttacttccgttggttagaccaaatatagaacaacaaaataaaatagttgaatatctggatgccaagtgttcaaagattgatgaaattgtagaaaagcagaaggtgataattgaaaaattagaggaatacaaattatcaattattacggaagcagtaaccagtggaataaatccagatgtagagatgaaggatagcggaagtgtatggtttggaaatattcctataaattgggaaatgaaaagattaaagtatgtattccatattcagaaagatattgcaggagaagaaggacatactgttttgtcaattacacaaagaggaataattcctaaagatttttctaacaatgaaggacagtttgcaaatagctatgcaaattatcagttagtccataaaggtgatttcgcaatgaatcatatggatttgctgaccggttgggtagatatttcaaagtacgaaggagttacaagtcctgattatagggtttttgtattaaatgataagaatggtatgtgtccaaagtattatttgtatatgatgcaaatgtgttatagtgcacgaattttttatggattaggacaaggtgtaagtggtatgggaagatggagactacaagcagataagtttttgaatttttatattcctattccaccatatgatgagcagaagaaaatagctgattacataactgataaggtaaatcatattgaagttgagattgataaaagaaataaacttattaagaaatatcaagaatacaaaaaatccctcatttacgaagttgtcacaggcaaaaaggaggtgtagctcatgtctgattttgatgtaaaagagaaacgatttgaggaagatatcgaagactatctgactcatcatggtggatataccaaaggtgatccaaagaaatttaatcgtgaatcaggacttgaagaagatacttttgttgagtttattaagacaagtcagcctaagaaatgggaaagatatgtaaaaatttatgcggagaattccgagaaacagatcatcgaacgttttaaaagagaagtaaagacaacgaatcttttgaatgtgatgcggcatggatttatggacagaggaatcaagttttatccgattttctggaagccggagacctctttgaatgagactacacagatgcagtatgatgcgaatatccttcattgtaccagacagcttcattattctgtaaaagaaaaaggactgaatgaccttgaagtgttagtcgctttttctggtgaagtgaaagataacgatgatgtgtttaccgaagagggaatgaacaaggataaagaaggcaagacaataaaagaaaaggctttgccggaaacattccatgcagatgattatggaatccttgttgttgcagaaaaatatcagacaggctttgatgaaccactacttcacaccatgtttgtggataagaaattgtccggtgtaaaggcagtacagactttatcaagactgaatcgtactacaagaggaaaagtagatacctttgtacttgattttgtgaattcagcagaggatatcaaagcatcttttgagccattctatgaggaaactgtgctcttggaggaaacagatcctaatgttgtatatgatatgaagaataccttggatgatttcagggtatatcagaaatcagaagtggataaatttgcggatattttctatcagaatgagaatcaatcagctggtgatcttggaaagcttcagggacagttaagaccagcaatagacagatatgaagtgcttgaggttgaaaaacaggatatatttaagtctaccttggcaagttttaaccgtgtgtatgcctatattacacaggtatgcagattatttgacaaggatattcatagattcagtatttattcaaaattcttatacacaatgcttcctaagggacatggtggagagaagataaatattgatgacaaagttcttcttgaatactataagctggaaaaagactttgaaggtccgatagagcttgaaagcacagaaggcggatatacacctatctccggtgattccggtcatagagagcctaagaaagacccgttgacagtaatcattgataagataaacgaaaagtatggcactcattttacagagatggataaagttcttgttcagatggaaaatgattatgccaatcaggagaaatggcagagctacgcaaagaacaatgacagggcaacatttatgctgttatttgaaaaggattttccgaatatggcagcagacagatatgagcagaatgaccagtttttcagaaaactgtttgatgatcctgatatgatgaggcaggtaatggagactgtaggttctgtattgtatgagagattgaagaagaaatatatctttgatccaaagtcgggagtaattgaagaggcgacaccggagacttatgtggaagatacatatttgacgaagaaataaggaagtgaaaacatgcagttaggatggatagatttttcaaaagaagaccggcagaaggcattcgatgtgattaaccttctgagtgaacagggagcagtcgatgaacttggaatcggcgttattcgtgatgcttttgccaattatttctttccggggacatctaccatccagactagagcaaagtacttccttattgttccatatatgttaagggaggctgttgatggcaggtatggaaaggatgcaaatagagttttaagagctatagattctgctgaaaaagattgtggcatcagattgttagaagcagatcccaaggcagaaggtgttattggaagtcgtgtattgccaaagggctgggtggcaagaaaaccatcagatatctactggaatggaattcgtacctttggaatattctgtgattatggtctgtctataccggagtatgtttcattggcggtaaagctaaaagaacagaagtctgtcagccggttgggaaacaggaatgatgatgcagaggaaaatgataaggatgattcggatgcaggagacatcggcaatattagattctggaatcttccgatttatcatgatgattggagagacaaccttacaatagagctgacgcaggaggaagcattctatctggataagcagattcagaagtcaacgaaagggtctcttttggaatatgtattgaaaaatcgtattgatttgaatgaatatgatgattttgcttctttaacggctgaactatcggaaaaagtaggtgaaaagctggcatatatgatgaagcttgcctgcgattttaataatctggtgtatatggcgagagtaagatacaatgtcatgctttcagaagacgagaatacatacgcaaatgatgaatggagcaggttgcttccggatataaggcataatgcgacagtagatctggatgcagtgtttggagaattccagttgatcaatccaagggcaaagagctttctatgtgggatacaagcagcatttattacattagatattgatatggctgatgaactgattcgcaagagggaacggagcctgaaaggagcagccagagcgaagttaagcagaacaaaggaatttgatcattcaaaatgggtaggcggtggaatgctcgattacagattctcgaatgccagaagaattgtgaatgacatctatgccggggaggtgagtgctgatgtttagaccggattcaaaccgagatagaacggattacagcggtattttgatgcctccggacggatatagattggacagagcagtaggcactacatattcacttgacctggaagcactcacagctgtggcgatatgtcttggattatctgaagaaacagatagtaagcttatgcaaaatccaattggtatgctgaatgcattgcagaaggtatcagataaaatcgtgctgttttgtgaagcaggacagattaaagtgccaacaaaaccgactgcactatctattttattagagaaaatggtagtagaggtcgcactgccaaaagatagacagcttggtcgatatccgtcatttcatccgaaaacatgggtattagcatatgtaaacgctgatggagataaaaaatatcgttttgtggtaatgagcagaaatctgacttttgacaggagctgggatatcagctttgcaatggatagcagtaaaaatgtcagacagaagaaaaagactcagcctatctgtgattttctggattatcttgtaatgaatgtgcataataccagcaataatgccggaaagaaaagaaacctgattcgtggattatgtgcagacattaaggatgtatccttttcacttgatagtaaaatatttggagaggattttgaagtgcttccacttggtattggaaaaaatgcttaccggatgcaggaggatatcctattctgcaaggaaagaggaaatgccaattcgacatttaatgagcttgtagtgatgtctccgtttttatcagaaagtgtgattgcagattttaacctgacagacagggcattgtcggactgtaagagaacacttgttacgagacgttctgagcttggaaaactcaaagcatcagatgtagataattttaccatctatgcattaaaggatgagattatagatggtgaggaagaaatttcagatgaactcgcagataaaaagaaacaggatattcatgcaaaaatctatctgagaaggaaatattcagatgttgacctgtatcttggttccatgaatgcttcctattctgcaattaataaaaatgttgaaatgatgctgtggcttggtacaaagaatatgtatctgaatggggataaattcttagaggatatattctgtggaccggtaggagatgcaaagaatccatttgagcaggttacagtagcggatgctgttttggaaacagaaagtgacaatagaaatctgctggagcagaaaattaaggacttgtgccgagtgaaaaggcaggctgtaatttcagaagataatgagaatgctggaaagtacaagatagaggttgagttcagtggtattgaatctgatagtgaggttacagtatcaccatttaattcaaagcaggagcagacattgtcagaacatatagagttttcagagcttgagatcttgcagttatcagagttctatgagattactgcaagatcaggtgatgatacaattcgcagaattattatgatccctacaagtggtttcccggatgacagagaaagtgctgcagtaaacagtgtggtaaaagatagggcatcatttgttgagtacatagcgtttgtacttggtgatgattatgtagcatctatgcttgaaggaaagcagatgggagaatccggcttttttgccaattcgagtgatgcaatgccggcactctatgaaaagatgttaaagacatctgtagaagggccggaaagaataaaagacattggatatgtgcttaagatggttacagataaggatattataccggatgaattccgtgaactgtatgagactttttgtaatactttgaaaatcagaagataacgaggtgatgtcatgttacaatttaatatagatgaaattgaaaagcgtaccctttccggtctgaaggattttcaaagagcgactgtggagagagtggattatctgttccggcataatcagaatcgtgtgcttgtagcagatgaagtgggtatgggaaaaactcttattgccagaggagcaattgtaaagacagcaagacttagaatcgaagagaaagatgatctgtttaaggtaatttatatctgctctaatcagaacatagcaaatcagaatatcagaaaacttgatgtaacaggaaagaatgccatcggctcagtatcagataccagactgtctatgcagcatttaaagattactgagcaggaaaatgatccgcagataaaggaaggttttatacagcttatcccacttacaccggaaacatctttccgcatgaccaccggaggtggaagtgtgcaggaaagagcacttatgtatgccattttaaggagaatgccggactttaaaggacatgtaacttctcttggaaaatttatgataatggatgctgtaaaagcatgggatggatgggcaaaatggaactttgaaaatcgtgtggcagaatgcgaaaagatgacgaagggtgtctatccacaaaatgtgatagaaaaaatccttaattatcaggagtatgaaagtataagggacatgctgcttaatcatttgcatgaaagaagatacaataaacagcttacatattccaattactatgtgatgaataagcttcgtgtgatgtttgcgagaatcagtgtatctatgcttgagccggatctggtaatcatggatgagtttcagagatttaagtttcttttgtcatccgatgacagtgagcttggtattcttgcacacagtttccttagtggacatgatacaagggtacttctgttgtcggctacaccatataaattgtattctacccttgaagagatagatgaaaatcagcttgatgagcattatgcagagttttttcaggttatgaactttctttttgatgatgaagtcaaagacattaaatttaaggaagtgtggaagaattattcccatgctctaagtgagttgaaggcaggggacagtgcaattatccgtatgaaggagctggcagaaaatgccatgtatcagggagtcagcaggacagagcgtatatctgtcatggattccggtgattatacggatgacagcagcgtgaagcatcatttgcagatagatgaaaatgacataaactcctatatacagatgtcacgattgttgtcaaaaacggattcaaatcattctttaccggtagattatgcaaagagctgtccgtatcttatgtcctttatgaagaaatataagattaaagagcagattgaaaaatattatataaaacatccagatgaatttggaagtgaaagagaacaatgtctcttgtggctgaatcgcaataaaatcaataaatatgatgaactgccgaaaaccaatgcaaggcttgaggcactgaaagaaaaagcatttaccggcggtgcagaaaaatatctgtggattcctccatcactgccatattatgagatgcagggagcatataaaaacagcaaaggcttttcaaaaatacttgtattttctgcatgggagatggttccacgaatgataggtgcgcttgtttcctatgaggcggaaagacttacagttggaaaactggtacatcagataaagaatcaggataagaagaatacggggtattttgcggatggttcgagacgatacccggtggcaaggctcaggtttaatgtttcaaatggagaagtaagaggcatgagcctgtttgcattgctttatccttcaaagacactttctgatatgtatttaccgattgagtcattgaataatcatgaatcattagaagtaatagagaaatctgtacggctgaaactgaaagagaagcttgcgataatcgaagaaaagtatggtgattcgggtaacaataaggaagatgccaggtggtattatcttgcaccgatgctcatggatggagtcatctatgcaaagcattggatagaggatattgtgtgggaaatgaatacagacgaagaggatacaacatctgaggtcagaagcagttcaaaggataagagaaataagggctttattgctcatattgataagctaagaagttatttggatgccccggaggagattcatcttggaagaaagccggaggatcttctggaaacattggtaaatatggtactgggttcgccagcaatatgcatttatcgttctaatggaagaagcacagccagagcaacatcgcttgcaaaggtatttgtcaataatttcaatttgccggagtcaacagctatcattgatcttgcttatggcagatgcagggatgataattcccattggcagaatgtacttaaatactgtaaagatggctgttttcaggcaatgattgatgaatatatccatatgctgaaagaaacagcaggttttcagtcggatggaaatcagtatcagattgtgcatgacatgatgatggattcattgaagatacatacagccacctatatcgctgatacttatcctgatttcaaaaaacgtattaacggagctgacaggaagagtgatggatgtcgaataaggtcgagttatgcagttggatttacaaaggatgcaggagataattccaaggtagtcatgcgtaaagaaaatatcagaaatgcctttaactcaccaatgcgtccatttgtgctcgccacaacatcaatcggacaggaaggattggattttcataattattgtcgtgtgattatgcactggaatcttccaagtaatcccatagatgtaggacggattttgcggacattcaaaataaaaaagaatgtggaggtaacagacaatggcaaaatcattatttgaggaactgggcggcaaatacgaaaggcaaggggattatttgataccgtgcttaactgtacccgccgaagaagaacaggcaataggcatctgggggcaacggcatttagattatctaaaacagtaccgtaaagttacatacaccaatcttcttacaagcggcaggctaaacgcctaccttgccgacatcaacagacaggcacaggaacgctttgaaaggctcatagagggtatgaaacaggcacagggcataacggaacagctaaaggcagaaaacgccttagaatggacaggatgcctcaataacataagggcttgtgcgagggagattgtggaaaaggaaattatttttgcataaacagatgattagtggcagggggagcttccgaacttgatgctcgtatccacatttctcaggtcatagcttgtggtgttcggtctcactgtctttcctgtcttcatacttcctgctgtatcatacacacccactgtcacttccgttaacggcaggtcagatgttaccgttccacggatgctgaaggaacttcccgccttttcaacgagtatgcttttgatgatataaatatctatctactcacaagttcttgtactctccataggcgtaaattccgaactaacgtatccgtacatatttgcattaacgtttcagtgttagcttgcaaatcgttctccataagccttgagatttatagatgcctggaaatctctgtcaatcatattcccacattcacatctataaaccctgtcagataacttcaaatcttctttgatgtttccacagcagctgcaaagctttgatgatggataaaaccgatcagccacaataagctgaatccctttatcattgcatttgtattcaagctgttttctaaacccaaaaaatccttgttcctgtactgctttggataaatgtctatttttcatcattccgctgacattcagatcttcaatacaaataaatcttggctttcgatttacgatctcagatatggtctgattcaaatagtttttacggatgtttgttaatctgtgatttcgttttaataaaagtttttcctttttgattacattatttgttttacagtaactttcccctttcttatttttctcgtaagaacgagagatactacgctgtaatctacgtttctgtttttctagtttctttactttctgactcttattgatgttcttatacttaacggcatcagagcagacagctaagtctttaattctctggccggctttcccaaaaccgttcggctaactttcagctcacttttgacagtccgtaaccccggtgtgcacgcacaccggtttgggctctttccctttcgctcgccgctactcaggaaatcgatgtttctttctcttcctccgggtacttagatgtttgggatttttccagaaagaactgttcagtgcctacaacgatacaaaaggcaacttgcagatgtttgcaacaccggttgattttaactggtactccagtgtgaccagctattatggatacaggattcatccaatatcaggagcaaatcagcttcataatggtatggatatcggagcaccggatgccttttccagatgcatctgcacatttgcaagtgccagggaatccacttctttcaaaaatggatatgcttttttatacatcgccggtgtatttcgcagcatttttttcgttgcttcatattcccgtatcttatcattcaacatctgattatataaaaaacgacagcagccaaatgttttggcgagcaggacttcctgttctctgtttgg
